(19) United States
(12) Patent Application Publication
(10) Pub. No.: US 2016/0376564 A1
(43) Pub. Date: Dec. 29, 2016

(54) Nucleic Acids and Polypeptides for Utilizing Plant Biomass

(71) Applicant: MetaMixis, Inc., Palo Alto, CA (US)

(72) Inventors: Cameron Strachan, Vancouver (CA); Steven Hallam, Vancouver (CA)

(73) Assignee: MetaMixis, Inc., Palo Alto, CA (US)

(21) Appl. No.: 15/191,482

(22) Filed: Jun. 23, 2016

Related U.S. Application Data
(60) Provisional application No. 62/185,377, filed on Jun. 26, 2015.
(60) Provisional application No. 62/191,966, filed on Jul. 13, 2015.

(51) Int. Cl. C12N 9/02; C12N 1/20; C12N 15/70; C07K 14/195

(52) U.S. Cl. CPC C12N 9/0004; C07K 14/195; C12N 1/20; C12N 15/70

(57) ABSTRACT

The present invention relates to novel nucleic acids, novel groups of polypeptides encoded by the polynucleotides, novel compositions, and methods of using the same with lignin containing substrates.

### FIELD OF THE INVENTION

[0001] This invention relates to the field of biomass utilization. In particular, the invention relates to nucleic acids and polypeptides useful for utilizing lignin-containing biomass.

### REFERENCE TO SEQUENCE LISTING, TABLE OR COMPUTER PROGRAM

[0002] The official copy of the Sequence Listing is submitted concurrently with the specification as an ASCII formatted text file via EFS-Web, with a file name of “MM009_ST25.txt”, a creation date of Jun. 17, 2016, and a size of 755 kilobytes. The Sequence Listing filed via EFS-Web is part of the specification and is incorporated in its entirety by reference herein.

### BACKGROUND OF THE INVENTION

[0003] Lignin is the second most abundant biopolymer on earth and a promising feedstock for deriving energy and industrial chemical precursors from renewable plant resources. The synthesis of lignin occurs within plant cell walls by free radical reactions that cross-link diverse combinations of monoaromatic compounds into a heterogeneous matrix that is resistant to microbial and chemical assailment. Lignin recalcitrance is further reflected in the deposition of coal throughout the Carboniferous period prior to the emergence of fungal enzymes associated with lignolysis in Permian forest soil ecosystems. Although a few bacterial strains and enzymes capable of lignin transformation have been identified, including Enterobacter lignolyticus SCF 1 and Rhodococcus jostii RHA1, white-rot basidiomycetes are currently the major source of lignin transforming enzymes, including laccases, manganese-dependent peroxidases, and lignin peroxidases. This presents numerous technical challenges associated with the genetic tractability of fungal systems and the expression of fungal-derived enzymes in heterologous hosts such as E. coli. Implementing high-throughput methods to expedite the discovery of bacterial lignin transformation pathway components provides one promising route toward overcoming these challenges. However, to date efforts to develop such functional screens have been unreliable due to the inherent complexity of the lignin polymer.

[0004] It has long been appreciated that environmental micro-organisms are an excellent source of solutions to industrial problems. In particular, they may provide a source for enzymes and associated co-factors. However, there is also an awareness that environmental microorganisms can be difficult to culture in the laboratory let alone on an industrial scale. Accordingly, a number of metagenome screening methods have been developed to isolate useful genesfrom metagenomes. For example, metagenomic nucleotide sequencing methods (Okuta et al. Gene (1998) 212:221-228), and enzyme activity based screening (Henne et al. Appl. Environ. Microbiol. (1999) 65:3901-3907). Further enzyme activity based screening methods have been developed, such as Substrate-Induced Gene-Expression (SIGEX) screening (Uchiyama et al. Nature Biotechnology(2005) 23(1):88-93) and more recently Product-Induced Gene-Expression (PIGEX) screening (Uchiyama and Miyazaki Appl. Environ. Microbiol. (2010) 76(21):7029-7035). Furthermore, several screening strategies have been developed to discover genetic elements that are activated in response to a metabolite, including intragenic genomic libraries and promoter traps (Uchiyama and Miyazaki PLOS ONE (2013) 8(9):e75795).

### SUMMARY OF THE INVENTION

[0005] The present invention relates to nucleic acids and polypeptides useful in lignin utilization. In some embodiments, the invention relates to the nucleic acids, and polypeptides encoded by Fosmid_182_02_CO3 (KJ802934); Fosmid 182_06_L14 (KJ802935); Fosmid 182_07_CO2 (KJ802936); Fosmid 182_08_C21 (KJ802937); Fosmid_182_09_J11 (KJ802938); Fosmid_182_10_L09 (KJ802939); Fosmid_182_11_B22 (KJ802940); Fosmid_182_13_A07 (KJ802941); Fosmid_182_13_F13 (KJ802942); Fosmid_182_16_E12 (KJ802943); Fosmid_182_16_J11 (KJ802944); Fosmid_182_17_09 (KJ802945); Fosmid_182_19_A11 (KJ802946); Fosmid_182_35_020 (KJ802947); Fosmid_182_42_K21 (KJ802948); Fosmid_183_01_D18 (KJ802949); Fosmid 183_12_O16 (KJ802950); Fosmid_183_21_D14 (KJ802951); Fosmid_183_24_C18 (KJ802952); Fosmid_183_26_G23 (KJ802953); Fosmid_183_29_MO4 (KJ802954); Fosmid_183_38_D19 (KJ802955); Fosmid_183_42_E18 (KJ802956); and Fosmid 183_52_O2 (KJ802957).

[0006] In some embodiments, the invention related to nucleic acids of SEQ ID NOs: 1, 3, 5, 7, 9, 11, 13, 15, 17, 19, 21, 23, 25, 27, 29, 31, 33, 35, 37, 39, 41, 43, 45, 47, 49, 51, 53, 55, 57, 59, 61, 63, 65, 67, 69, 71, 73, or 75. In some embodiments, the invention relates to polypeptides of SEQ ID NOs: 2, 4, 6, 8, 10, 12, 14, 16, 18, 20, 22, 24, 26, 28, 30, 32, 34, 36, 38, 40, 42, 44, 46, 48, 50, 52, 54, 56, 58, 60, 62, 64, 66, 68, 70, 72, 74, or 76. In some embodiments, the invention relates to electron transfer polypeptides (e.g., oxidoreductase activity) of SEQ ID NOS: 2, 12, 14, 24, 30, 36, 38, 50, 56, 62, 64, 68, 70, and 72, and/or co-factor generation polypeptides (e.g., hydrogen peroxide formation) of SEQ ID NOS: 4, 16, 28, 48, and 60, protein secretion polypeptides (e.g., secretion apparatus or signal peptide) of SEQ ID NOS: 6, 20, 32, 42 and 44, and polypeptides involved in small molecule transport (e.g., multidrug efflux superfamily) of SEQ ID NO: 34. In some embodiments, the nucleic acids and polypeptides of the invention are motility related polypeptides (e.g., methyl accepting chemotaxis proteins (MCP), or signal transduction pathway components (e.g., PAS domain containing sensors). In some embodiments, the nucleic acids and/or polypeptides of the invention include variants or analogs or alleles of any of the above nucleic acids. In some embodiments, the nucleic acids of the invention hybridize under stringent hybridization conditions to one of SEQ ID NO. 1, 3, 5, 7, 9, 11, 13, 15, 17, 19, 21, 23, 25, 27, 29, 31, 33, 35, 37, 39, 41, 43, 45, 47, 49, 51, 53, 55, 57, 59, 61, 63, 65, 67, 69, 71, 73, or 75. In some embodiments, the polypeptides of the invention are encoded by nucleic acids that hybridize under stringent hybridization conditions to one of SEQ ID NO. 1, 3, 5, 7, 9, 11, 13, 15, 17, 19, 21, 23, 25, 27, 29, 31, 33, 35, 37, 39, 41, 43, 45, 47, 49, 51, 53, 55, 57, 59, 61, 63, 65, 67, 69, 71, 73, or 75. In some embodiments, the polypeptides of the invention have 70%, 80%, 90%, or 95% sequence identity with a polypeptide of SEQ ID NO. 2, 4, 6, 8, 10, 12, 14, 16, 18, 20, 22, 24, 26, 28, 30, 32, 34, 36, 38, 40, 42, 44, 46, 48, 50, 52, 54, 56, 58, 60, 62, 64, 66, 68, 70, 72, 74, or 76.

[0007] In some embodiments, the invention also relates to nucleic acids of SEQ ID NOs: 77-96. In some embodiments, the invention relates to polypeptides found in Table 3 that are encoded within SEQ ID NOs: 77-96. In some embodiments, the nucleic acids and/or polypeptides of the invention include variants or analogs or alleles of any of the above nucleic acids and/or polypeptides. In some embodiments, the nucleic acids of the invention hybridize under stringent hybridization conditions to one of SEQ ID NO. 77-96. In some embodiments, the polypeptides of the invention are encoded by nucleic acids that hybridize under stringent hybridization conditions to one of SEQ ID NO. 77-96. In some embodiments, the polypeptides of the invention have 70%, 80%, 90%, or 95% sequence identity with a polypeptide of Table 3 that are encoded within SEQ ID NOs: 77-96.

[0008] In some embodiments, host cells contain the nucleic acids and/or polypeptides of the invention. In some embodiments, the host cells are prokaryotic cells. In some embodiments, the prokaryotic cell is a species from Acidovorax, Agrobacterium, Alicyclobacillus, Anabaena, Anacystis, Arthrobacter, Azobacter, Bacillus, Brevibacterium, Chromatium, Clostridium, Corynebacterium, Enterobacter, Erwinia, Escherichia, Lactobacillus, Lactococcus, Mesorhizobium, Methylobacterium, Microbacterium, Phormidium, Pseudomonas, Rhodobacter, Rhodopseudomonas, Rhodospirillum, Rhodococcus, Salmonella, Scenedesmun, Serratia, Shigella, Staphylococcus, Strepromyces, Synnecoccus, and Zymomonas. In some embodiments, the host cell is E. coli. In some embodiments, the host cell is a eukaryotic cell. In some embodiments, the eukaryotic cell is an algae specie and/or a photosynthetic microorganism from Agmenellum, Amphora, Anabaena, Ankistrodesmus, Botryococcus, Boekelovia, Borodinella, Botryococcus, Carteria, Chaetoceros, Chlamydomonas, Chlorella, Chlorococcum, Chlorogonium, Chrysosphaera, Cricosphaera, Cryptomonas, Cyclotella, Dunaliella, Ellipsoidon, Eremosphaera, Euglena, Fragilaria, Gleocapsa, Gloeothamnion, Hymenomonas, Isochrysis, Lepocinclis, Monoraphidium, Nannochloris, Nannochloropsis, Navicula, Nephrochloris, Nitschia, Nitzschia, Ochromonas, Oocystis, Oscillatoria, Nitzschia, Pascheria, Phagus, Phormidium, Platymonas, Pleurochrysis Prototheca, Pyrobotrys Scenedesmus, Spirogyra, Tetraedron, Tetraselmis, or Volvox. In some embodiments, the host cell is Botryococcus braunii, Prototheca krugani, Prototheca moriformis, Prototheca portoricensis, Prototheca stagnora, Prototheca wickerhamii, or Prototheca zopfii. In some embodiments, the eukaryotic cell is a fungi specie from Aspergillus, Candida, Chlamydomonas, Chrysosporium, Cryotococcus, Debaromyces, Fusarium, Hansenula, Kluyveromyces, Neotyphodium, Neurospora, Penicillium, Pichia, Saccharomyces, Schizosaccharomyce, Trichoderma, Xanthophyllomyces, Yarrowia, and Zygosaccharomyces. In some embodiments, the fungi is Pichia pastoris, Saccharomyces cerevisiae, Schizosaccharomyces pompe, Kluyveromyces lactic, Hansenula polymorpha, or a filamentous fungi, e.g. Trichoderma, Aspergillus sp., including Aspergillus niger, Aspergillus phoenicis, Aspergillus carbonarius.

[0009] In some embodiments, the invention relates to extracts made from host cells containing the nucleic acids and/or polypeptides of the invention. In some embodiments, the extracts are made from E. coli that contain one or more of the fosmids of the invention. In some embodiments, the extracts are made from E. coli containing one or more of the fosmids: Fosmid_182_35_O20 (Annotation No. KJ802947), Fosmid 182_16_J11 (Ann. No. KJ802944), Fosmid_182_11_B22 (Ann. No. KJ802940), Fosmid 182_09_J11 (Ann. No. KJ802938), Fosmid_182_42_K21 (Ann. No. KJ802948), Fosmid 182_02_CO3 (Ann. No. KJ802934), or Fosmid_182_16_E12 (Ann. No. KJ802943). In some embodiments, the extracts are made from E. coli that contains one or more of SEQ ID NOs.: 77-96. In some embodiments, the extracts contain one or more of the polypeptides from Table 3 that are encoded within SEQ ID NOs: 77-96. In some embodiments, the extracts are made from host cells containing one or more of these nucleic acids and/or polypeptides, and additionally containing other nucleic acids of the invention. In some embodiments, the invention relates to a mixture of extracts comprising extracts made from host cells with one or more nucleic acids and/or polypeptides of the invention, and extracts made from cells without a nucleic acid or polypeptide of the invention.

[0010] In some embodiments, the invention relates to methods for utilizing lignin containing biomass or substrates using the nucleic acids and/or polypeptides of the invention. In some embodiments, extracts made from host cells containing the nucleic acids of the invention are used for lignin utilization. In some embodiments, lignin containing biomass or substrates are combined with a mixture of extracts comprising extracts made from host cells with one or more nucleic acids and/or polypeptides of the invention, and extracts made from cells without a nucleic acid or polypeptide of the invention. In some embodiments, host cells containing the nucleic acids and/or polypeptides of the invention are used with lignin containing biomass or substrates.

[0011] In some embodiments, the invention relates to combinatorial use of nucleic acids and/or polypeptides for a non-heme bacterial or archaeal oxidoreductase that binds Fe/Cu/Zn/Mn and utilizes lignin or lignin transformation products as a substrate and one or more bacterial proteins from functional classes (a) to (e): (a) co-substrate generation; (b) protein secretion; (c) small molecule or breakdown product transportation or bacterial efflux pumps and related transmembrane proteins; (d) motility and protein secretion machinery; and (e) signal transduction or transcriptional regulation; for transforming a heterogeneous aromatic polymer.

[0012] In some embodiments, the invention relates to a combinatorial use of nucleic acids and/or polypeptides for a non-heme bacterial or archaeal oxidoreductase that binds Fe/Cu/Zn/Mn and utilizes heterogeneous aromatic polymers or their transformation products as a substrate and one or more bacterial proteins from functional classes (a) to (e): (a) co-substrate generation; (b) protein secretion; (c) small molecule or breakdown product transportation or bacterial efflux pumps and related transmembrane proteins; (d) motility and protein secretion machinery; and (e) signal transduction or transcriptional regulation; for transforming a heterogeneous aromatic polymer.

[0013] In some embodiments, the invention relates to a method for transforming a heterogeneous aromatic polymer, the method including: (a) the addition of a non-heme bacterial or archaeal oxidoreductase that binds Fe/Cu/Zn/Mn and utilizes lignin or lignin transformation products as a substrate to a heterogeneous aromatic polymer source; and (b) the addition of one or more bacterial or archaeal proteins from the functional classes (i) to (v): (i) co-substrate generation; (ii) protein secretion; (iii) small molecule or breakdown product transportation or bacterial efflux pumps; (iv) motility and protein secretion machinery; and (v) signal transduction or transcriptional regulation.

[0014] In some embodiments, the invention relates to a method for transforming a heterogeneous aromatic polymer, the method including: (a) the addition of a non-heme bacterial or archaeal oxidoreductase that binds Fe/Cu/Zn/Mn and utilizes heterogeneous aromatic polymers or their transformation products as a substrate to a heterogeneous aromatic polymer source; and (b) the addition of one or more bacterial or archaeal proteins from the functional classes (i) to (v): (i) co-substrate generation; (ii) protein secretion; (iii) small molecule or breakdown product transportation or bacterial efflux pumps; (iv) motility and protein secretion machinery; and (v) signal transduction or transcriptional regulation.

[0015] In some embodiments, the invention relates to a method for heterogeneous aromatic polymer transformation, the method including: (a) obtaining a heterogeneous aromatic polymer source material; and (b) adding an archaebacterial or bacterialorganism to the heterogeneous aromatic polymer source material from (a), wherein the archaebacteria or bacteria comprises a combination of protein-coding genes selected from a non-heme bacterial or archaeal oxidoreductase that binds Fe/Cu/Zn/Mn and utilizes lignin or lignin transformation products as a substrate to a heterogeneous aromatic polymer source; and one or more bacterial or archaeal of protein-coding genes from the functional classes (i) to (v): (i) co-substrate generation; (ii) protein secretion; (iii) small molecule or breakdown product transportation or bacterial efflux pumps; (iv) motility and protein secretion machinery; and (v) signal transduction or transcriptional regulation, in an amount sufficient to and for a sufficient time period to cause transformation of the heterogeneous aromatic polymer to a desired product.

[0016] In some embodiments, the invention relates to In accordance with another aspect of the invention, there is provided a method for heterogeneous aromatic polymer transformation, the method including: (a) obtaining a heterogeneous aromatic polymer source material; and (b) adding an archaebacterial or bacterial organism to the heterogeneous aromatic polymer source material from (a), wherein the archaebacteria or bacteria comprises a combination of protein-coding genes selected from a non-heme bacterial or archaeal oxidoreductase that binds Fe/Cu/Zn/Mn and utilizes heterogeneous aromatic polymers or their transformation products as a substrate to a heterogeneous aromatic polymer source; and one or more bacterial or archaeal of protein-coding genes from the functional classes (i) to (v): (i) co-substrate generation; (ii) protein secretion; (iii) small molecule or breakdown product transportation or bacterial efflux pumps; (iv) motility and protein secretion machinery; and (v) signal transduction or transcriptional regulation, in an amount sufficient to and for a sufficient time period to cause transformation of the heterogeneous aromatic polymer to a desired product.

### BRIEF DESCRIPTION OF THE DRAWINGS

[0017] FIG. 1 illustrates a profile of relative amounts of monoaromatic compounds detected by GC-MS, for cultures of E. coli harboring different fosmid clones after incubation with HKL-F1 in minimal media.

[0018] FIG. 2 illustrates a profile of relative amounts of monoaromatic compounds detected by GC-MS, for cultures of E. coli harboring different fosmid clones after incubation with HP-L™ in minimal media.

[0019] FIG. 3 illustrates a comparative analysis of gene types in active fosmids, wherein the bar graphs show the relative number of annotated genes falling within the six functional classes implicated in lignin transformation phenotypes.

### DETAILED DESCRIPTION OF THE INVENTION

[0020] Before the various embodiments are described, it is to be understood that the teachings of this disclosure are not limited to the particular embodiments described, and as such can, of course, vary. It is also to be understood that the terminology used herein is for the purpose of describing particular embodiments only, and is not intended to be limiting, since the scope of the present teachings will be limited only by the appended claims.

[0021] Unless defined otherwise, all technical and scientific terms used herein have the same meaning as commonly understood by one of ordinary skill in the art to which this disclosure belongs. Although any methods and materials similar or equivalent to those described herein can also be used in the practice or testing of the present teachings, some exemplary methods and materials are now described.

[0022] It must be noted that as used herein and in the appended claims, the singular forms “a”, “an”, and “the” include plural referents unless the context clearly dictates otherwise. It is further noted that the claims can be drafted to exclude any optional element. As such, this statement is intended to serve as antecedent basis for use of such exclusive terminology as “solely,” “only” and the like in connection with the recitation of claim elements, or use of a “negative” limitation. Numerical limitations given with respect to concentrations or levels of a substance are intended to be approximate, unless the context clearly dictates otherwise. Thus, where a concentration is indicated to be (for example) 10 μg, it is intended that the concentration be understood to be at least approximately or about 10 μg.

[0023] As will be apparent to those of skill in the art upon reading this disclosure, each of the individual embodiments described and illustrated herein has discrete components and features which can be readily separated from or combined with the features of any of the other several embodiments without departing from the scope or spirit of the present teachings. Any recited method can be carried out in the order of events recited or in any other order which is logically possible.

### DEFINITIONS

[0024] In reference to the present disclosure, the technical and scientific terms used in the descriptions herein will have the meanings commonly understood by one of ordinary skill in the art, unless specifically defined otherwise. Accordingly, the following terms are intended to have the following meanings.

[0025] As used herein, “biomass” refers to material produced by growth and/or propagation of cells. Biomass may contain cells and/or intracellular contents as well as extracellular material.

[0026] As used herein, “codon optimized” refers to changes in the codons of the polynucleotide encoding a protein to those preferentially used in a particular organism such that the encoded protein is efficiently expressed in the organism of interest. Although the genetic code is degenerate in that most amino acids are represented by several codons, called “synonyms” or “synonymous” codons, it is well known that codon usage by particular organisms is nonrandom and biased towards particular codon triplets. This codon usage bias may be higher in reference to a given gene, genes of common function or ancestral origin, highly expressed proteins versus low copy number proteins, and the aggregate protein coding regions of an organism's genome.

[0027] As used herein, “consensus sequence” and “canonical sequence” refer to an archetypical amino acid sequence against which all variants of a particular protein or sequence of interest are compared. The terms also refer to a sequence that sets forth the nucleotides that are most often present in a DNA sequence of interest among members of related gene sequences. For each position of a gene, the consensus sequence gives the amino acid that is most abundant in that position in a multiple sequence alignment (MSA).

[0028] As used herein, “control sequence” refers to components, which are used for the expression of a polynucleotide and/or polypeptide of the present invention. Each control sequence may be native or foreign to the nucleic acid sequence encoding the polypeptide. Such control sequences may include, but are not limited to, some or all of the following: a promoter, an enhancer, an operator, an attenuator, a shine-delgarno sequence, a leader, a polyadenylation sequence, a propeptide sequence, a signal peptide sequence, and a transcription terminator. At a minimum, the control sequences include a promoter and transcriptional signals, and where appropriate, translational start and stop signals.

[0029] As used herein, an “effective amount” refers to an amount of a compound, formulation, material, or composition, as described herein effective to achieve a particular biological result.

[0030] As used herein, the terms “expression vector” or “expression construct” or “plasmid” or “recombinant DNA construct” refer to a nucleic acid construct, that has been generated recombinantly or synthetically via human intervention, including by recombinant means or direct chemical synthesis, with a series of specified nucleic acid elements that permit transcription and/or translation of a particular nucleic acid in a host cell. The expression vector can be part of a plasmid, virus, or nucleic acid fragment. Typically, the expression vector includes a nucleic acid to be transcribed operably linked to a promoter. The expression vector can exist in a host cell in either an episomal or integrated vector.

[0031] As used herein, “exogenous gene” refers to a nucleic acid that codes for the expression of an RNA and/or protein that has been introduced (“transformed”) into a cell. A transformed cell may be referred to as a recombinant cell, into which additional exogenous gene(s) may be introduced. The exogenous gene may be from a different species (and so heterologous), or from the same species (and so homologous), relative to the cell being transformed. Thus, an exogenous gene can include a homologous gene that occupies a different location in the genome of the cell or is under different control, relative to the endogenous copy of the gene. An exogenous gene may be present in more than one copy in the cell. An exogenous gene may be maintained in a cell as an insertion into the genome or as an episomal molecule.

[0032] As used herein, “extract” refers to a solution containing the contents or sub-contents of lysed cells.

[0033] As used herein, “heterologous” polynucleotide or polypeptide refers to any polynucleotide that is introduced into a host cell by laboratory techniques, or a polynucleotide that is foreign to a host cell. As such, the term includes polynucleotides that are removed from a host cell, subjected to laboratory manipulation, and then reintroduced into a host cell. In some embodiments, the introduced polynucleotide expresses the heterologous polypeptide. Heterologous polypeptides are those polypeptides that are foreign to the host cell being utilized.

[0034] As used herein, “isolated polypeptide” refers to a polypeptide which is substantially separated from other components that naturally accompany it, e.g., protein, lipids, and polynucleotides. The term embraces polypeptides which have been removed or purified from their naturally-occurring environment or expression system (e.g., host cell or in vitro synthesis). The engineered polypeptides of the invention may be present within a cell, present in the cellular medium, or prepared in various forms, such as lysates or isolated preparations.

[0035] As used herein, “lysis” refers to the breakage of the plasma membrane and optionally the cell wall of a biological organism sufficient to release at least some intracellular content, often by mechanical, viral or osmotic mechanisms that compromise its integrity.

[0036] As used herein, “lysing” refers to disrupting the cellular membrane and optionally the cell wall of a biological organism or cell sufficient to release at least some intracellular content.

[0037] As used herein, “naturally-occurring” or “wild-type” refers to the form found in nature. For example, a naturally occurring or wild-type polypeptide or polynucleotide sequence is a sequence present in an organism that can be isolated from a source in nature and which has not been intentionally modified by human manipulation.

[0038] As used herein, “operably linked” and “operable linkage” refer to a configuration in which a control sequence or other nucleic acid is appropriately placed (i.e., in a functional relationship) at a position relative to a polynucleotide of interest such that the control sequence or other nucleic acid can interact with the polynucleotide of interest. In the case of a control sequence, operable linkage means the control sequence directs or regulates the expression of the polynucleotide and/or polypeptide of interest. In the case of polypeptides, operably linked refers to a configuration in which a polypeptide is appropriately placed at a position relative to a polypeptide of interest such that the polypeptide can interact as desired with the polypeptide of interest.

[0039] As used herein, “percentage of sequence identity” and “percentage homology” are used interchangeably herein to refer to comparisons among polynucleotides or polypeptides, and are determined by comparing two optimally aligned sequences over a comparison window, where the portion of the polynucleotide or polypeptide sequence in the comparison window may comprise additions or deletions (i.e., gaps) as compared to the reference sequence for optimal alignment of the two sequences. The percentage may be calculated by determining the number of positions at which the identical nucleic acid base or amino acid residue occurs in both sequences to yield the number of matched positions, dividing the number of matched positions by the total number of positions in the window of comparison and multiplying the result by 100 to yield the percentage of sequence identity. Alternatively, the percentage may be calculated by determining the number of positions at which either the identical nucleic acid base or amino acid residue occurs in both sequences or a nucleic acid base or amino acid residue is aligned with a gap to yield the number of matched positions, dividing the number of matched positions by the total number of positions in the window of comparison and multiplying the result by 100 to yield the percentage of sequence identity. Those of skill in the art appreciate that there are many established algorithms available to align two sequences. Optimal alignment of sequences for comparison can be conducted, e.g., by the local homology algorithm of Smith and Waterman, Adv Appl Math. 2:482, 1981; by the homology alignment algorithm of Needleman and Wunsch, J Mol Biol. 48:443, 1970; by the search for similarity method of Pearson and Lipman, Proc Natl Acad Sci. USA 85:2444, 1988; by computerized implementations of these algorithms (GAP, BESTFIT, FASTA, and TFASTA in the GCG Wisconsin Software Package), or by visual inspection (see generally, Current Protocols in Molecular Biology, F. M. Ausubel et al., eds., Greene Publishing Associates, Inc. and John Wiley & Sons, Inc., (1995 Supplement). Examples of algorithms that are suitable for determining percent sequence identity and sequence similarity are the BLAST and BLAST 2.0 algorithms, which are described in Altschul et al., J. Mol. Biol. 215:403-410, 1990; and Altschul et al., Nucleic Acids Res. 25(17):3389-3402, 1977; respectively. Software for performing BLAST analyses is publicly available through the National Center for Biotechnology Information website. BLAST for nucleotide sequences can use the BLASTN program with default parameters, e.g., a wordlength (W) of 11, an expectation (E) of 10, M=5, N=−4, and a comparison of both strands. BLAST for amino acid sequences can use the BLASTP program with default parameters, e.g., a wordlength (W) of 3, an expectation (E) of 10, and the BLOSUM62 scoring matrix (see Henikoff and Henikoff, Proc Natl Acad Sci. USA 89:10915, 1989). Exemplary determination of sequence alignment and % sequence identity can also employ the BESTFIT or GAP programs in the GCG Wisconsin Software package (Accelrys, Madison Wis.), using default parameters provided.

[0040] As used herein, “recombinant” or “engineered” or “non-naturally occurring” refers to a cell, nucleic acid, protein or vector that has been modified due to the introduction of an exogenous nucleic acid or the alteration of a native nucleic acid. Thus, e.g., recombinant cells express genes that are not found within the native (non-recombinant) form of the cell or express native genes differently than those genes are expressed by a non-recombinant cell. A “recombinant nucleic acid” is a nucleic acid originally formed in vitro, in general, by the manipulation of nucleic acid, e.g., using polymerases and endonucleases, or otherwise is in a form not normally found in nature. Recombinant nucleic acids may be produced, for example, to place two or more nucleic acids in operable linkage. Thus, an isolated nucleic acid or an expression vector formed in vitro by ligating DNA molecules that are not normally joined in nature, are both considered recombinant for the purposes of this invention. Once a recombinant nucleic acid is made and introduced into a host cell or organism, it may replicate using the in vivo cellular machinery of the host cell; however, such nucleic acids, once produced recombinantly, although subsequently replicated intracellularly, are still considered recombinant for purposes of this invention. Similarly, a “recombinant protein” is a protein made using recombinant techniques, i.e., through the expression of a recombinant nucleic acid.

[0041] As used herein, “reference sequence” refers to a defined sequence used as a basis for a sequence comparison. A reference sequence may be a subset of a larger sequence, for example, a segment of a full-length gene or polypeptide sequence. Generally, a reference sequence is at least 20 nucleotide or amino acid residues in length, at least 25 residues in length, at least 50 residues in length, or the full length of the nucleic acid or polypeptide. Since two polynucleotides or polypeptides may each (1) comprise a sequence (i.e., a portion of the complete sequence) that is similar between the two sequences, and (2) may further comprise a sequence that is divergent between the two sequences, sequence comparisons between two (or more) polynucleotides or polypeptide are typically performed by comparing sequences of the two polynucleotides or polypeptides over a “comparison window” to identify and compare local regions of sequence similarity. In some embodiments, a “reference sequence” can be based on a primary amino acid sequence, where the reference sequence is a sequence that can have one or more changes to the primary sequence.

[0042] As used herein, “saccharification” refers to a process of converting biomass, usually cellulosic or lignocellulosic biomass, into monomeric sugars, such as glucose and xylose. “Saccharified” or “depolymerized” cellulosic material or biomass refers to cellulosic material or biomass that has been converted into monomeric sugars through saccharification.

[0043] As used herein, “stringent hybridization conditions” refers to hybridizing in 50% formamide at 5×SSC at a temperature of 42° C. and washing the filters in 0.2×SSC at 60° C. (1×SSC is 0.15M NaCl, 0.015M sodium citrate.) Stringent hybridization conditions also encompasses low ionic strength and high temperature for washing, for example 0.015 M sodium chloride/0.0015 M sodium citrate/O. 1% sodium dodecyl sulfate at 50° C.; hybridization with a denaturing agent, such as formamide, for example, 50% (v/v) formamide with 0.1% bovine serum albumin/0.1% Ficoll/0.1% polyvinylpyrrolidone/50 mM sodium phosphate buffer at pH 6.5 with 750 mM sodium chloride, 75 mM sodium citrate at 42° C.; or 50% formamide, 5×SSC (0.75 M NaCl, 0.075 M sodium citrate), 50 mM sodium phosphate (pH 6.8), 0.1% sodium pyrophosphate, 5×Denhardt's solution, sonicated salmon sperm DNA (50 μg/ml), 0.1% SDS, and 10% dextran sulfate at 42° C., with washes at 42° C. in 0.2×SSC (sodium chloride/sodium citrate) and 50% formamide at 55° C., followed by a high-stringency wash consisting of 0.1×SSC containing EDTA at 55° C.

[0044] As used herein, “substantial identity” refers to a polynucleotide or polypeptide sequence that has at least 80 percent sequence identity, at least 85 percent identity and 89 to 95 percent sequence identity. Substantial identity also encompasses at least 99 percent sequence identity as compared to a reference sequence over a comparison window of at least 20 residue positions or a window of at least 30-50 residues, wherein the percentage of sequence identity is calculated by comparing the reference sequence to a sequence that includes deletions or additions or substitutions over the window of comparison. In specific embodiments applied to polypeptides, the term “substantial identity” means that two polypeptide sequences, when optimally aligned, such as by the programs GAP or BESTFIT using standard parameters, i.e., default parameters, share at least 80 percent sequence identity, preferably at least 89 percent sequence identity, at least 95 percent sequence identity or more (e.g., 99 percent sequence identity).

[0045] As used herein, “substantially pure polypeptide” refers to a composition in which the polypeptide species is the predominant species present (i.e., on a molar or weight basis it is more abundant than any other individual macromolecular species in the composition), and is generally a substantially purified composition when the object species comprises at least about 50 percent of the macromolecular species present by mole or % weight. Generally, a substantially pure polypeptide composition will comprise about 60% or more, about 70% or more, about 80% or more, about 90% or more, about 95% or more, and about 98% or more of all macromolecular species by mole or % weight present in the composition. In some embodiments, the object species is purified to essential homogeneity (i.e., contaminant species cannot be detected in the composition by conventional detection methods) wherein the composition consists essentially of a single macromolecular species. Solvent species, small molecules (<500 Daltons), and elemental ion species are not considered macromolecular species.

### Lignin Utilizing Polynucleotides, Polypeptides, and Extracts

[0046] In one aspect, the invention provides polypeptides having activities that improve lignin utilization, including, polypeptides with electron transfer activity (e.g., oxidoreductase activity), polypeptides involved with co-factor generation (e.g., hydrogen peroxide formation), polypeptides involved with protein secretion (secretion apparatus or signal peptide), polypeptides involved with small molecule transport (e.g., multidrug efflux superfamily), polypeptides involved with motility (e.g., methyl accepting chemotaxis proteins (MCP)), and polypeptides involved with signal transduction pathway components (e.g., PAS domain containing sensors).

[0047] In some embodiments, one or more nucleic acids having the sequences of SEQ ID NOs: 77-96 are used in the invention to utilize lignin containing biomass or substrates. Tables 1 and 3 lists some of the polynucleotides of the invention, and describes the Fosmid ID, Island number within the Fosmid (some fosmids have two genetics islands), GenBank Accession number, start and stop sequences, and SEQ ID NO. Table 1 and 3 lists the Fosmid ID, Island number, GenBank Accession number, start and stop sequences, and description for each polypeptide encoded by a SEQ ID NO and Island of the invention.

[0048] The present invention also relates to recombinant and/or isolated and/or purified polypeptide sequences that are selected from a polypeptide sequence or a fragment of a polypeptide sequence of SEQ ID NOs: 2, 4, 6, 8, 10, 12, 14, 16, 18, 20, 22, 24, 26, 28, 30, 32, 34, 36, 38, 40, 42, 44, 46, 48, 50, 52, 54, 56, 58, 60, 62, 64, 66, 68, 70, 72, 74, or 76. Tables 1 lists the Gene ID, Accession No., polypeptide class, secretion signal class, polynucleotide SEQ ID NO., and polypeptide SEQ ID NO. for exemplary nucleic acids of the invention. All of the sequences reported in Tables 1 and 3, and all the sequences reported at the above GenBank Accession numbers are hereby incorporated by reference in their entirety for all purposes. The functional groups are: electron transfer (e.g., oxidoreductase activity) for example SEQ ID NOS: 2, 12, 14, 24, 30, 36, 38, 50, 56, 62, 64, 68, 70, and 72), co-factor generation (e.g., hydrogen peroxide formation) for example SEQ ID NOS: 4, 16, 28, 48, and 60), protein secretion (e.g., secretion apparatus or signal peptide) for example SEQ ID NOS: 6, 20, 32, 42, and 44), and small molecule transport (e.g., multidrug efflux superfamily) for example SEQ ID NOS: 34. Other functional groups into which nucleic acids of the Tables fall are: motility (e.g., methyl accepting chemotaxis proteins (MCP), and signal transduction pathway components (e.g., PAS domain containing sensors). In some embodiments, one or more of the lignin utilization polypeptides are used. In some embodiments, the one or more lignin utilization polypeptides are used in a host cell.

[0049] The present invention also relates to recombinant and/or isolated and/or purified polypeptide sequences that are selected from a polypeptide sequence or a fragment of a polypeptide sequence of the polypeptide and nucleotide sequences found in the sequences deposited at GenBank under Accession Nos. KJ802937, KJ802939, KJ802940, KJ802942, KJ802943, KJ802944, KJ802947, KJ802948, KJ802949, KJ802951, KJ802953, and KJ802957, and other deposited sequences are found at Accessions Nos. KJ802934, KJ802935, KJ802936, KJ802937, KJ802938, KJ802939, KJ802940, KJ802941, KJ802942, KJ802943, KJ802944, KJ802945, KJ802946, KJ802947, KJ802948, KJ802949, KJ802950, KJ802951, KJ802952, KJ802953, KJ802954, KJ802955, KJ802956, and KJ802957, and exemplary descriptions of these sequences are found in Tables 1 and 3. All of the sequences reported in Table 1 and 3, and all the sequences reported at the above GenBank Accession Nos. are incorporated by reference in their entirety for all purposes. The functional groups are: electron transfer (e.g., oxidoreductase activity), co-factor generation (e.g., hydrogen peroxide formation), protein secretion (e.g., secretion apparatus or signal peptide), and small molecule transport (e.g., multidrug efflux superfamily), motility (e.g., methyl accepting chemotaxis proteins (MCP), and signal transduction pathway components (e.g., PAS domain containing sensors). In some embodiments, one or more of the lignin utilization polypeptides are used. In some embodiments, the one or more lignin utilization polypeptides are used in a host cell.

[0050] The following fosmids sequences were deposited on 8 May 2014, and published on Jul. 14, 2014, in association with the corresponding accession numbers as follows: Fosmid_182_02 CO3 (KJ802934); Fosmid_182_06_L14 (KJ802935); Fosmid 182_07_CO2 (KJ802936); Fosmid_182_08_C21 (KJ802937); Fosmid_182_09_J11 (KJ802938); Fosmid_182_10 L09 (KJ802939); Fosmid_182_11_B22 (KJ802940); Fosmid_182_13_A07 (KJ802941); Fosmid_182_13_F13 (KJ802942); Fosmid 182_16_E12 (KJ802943); Fosmid_182_16_J11 (KJ802944); Fosmid_182_17_09 (KJ802945); Fosmid_182_19_A11 (KJ802946); Fosmid_182_35_020 (KJ802947); Fosmid_182_42_K21 (KJ802948); Fosmid_183_01_D18 (KJ802949); Fosmid 183_12_O16 (KJ802950); Fosmid_183_21_D14 (KJ802951); Fosmid_183_24_C18 (KJ802952); Fosmid_183_26_G23 (KJ802953); Fosmid_183_29_MO4 (KJ802954); Fosmid_183_38_D19 (KJ802955); Fosmid_183_42_E18 (KJ802956); and Fosmid 183_52_O2 (KJ802957). These Fosmid sequences are hereby incorporated by reference in their entirety for all purposes.

[0051] The present invention also relates to extracts made from host cells comprising and expressing the polypeptides of the invention. In some embodiments, the polypeptides from the invention are expressed in a host organism that could be a representative of taxonomic groups such as Acidovorax, Agrobacterium, Alicyclobacillus, Anabaena, Anacystis, Arthrobacter, Azobacter, Bacillus, Brevibacterium, Chromatium, Clostridium, Corynebacterium, Enterobacter, Erwinia, Escherichia, Lactobacillus, Lactococcus, Mesorhizobium, Methylobacterium, Microbacterium, Phormidium, Pseudomonas, Rhodobacter, Rhodopseudomonas, Rhodospirillum, Rhodococcus, Salmonella, Scenedesmun, Serratia, Shigella, Staphylococcus, Strepromyces, Synnecoccus, and Zymomonas. In some embodiment, these host organisms are grown and one or more of the polypeptides related to this invention are extracted. For example, a polypeptide from fosmid ID 182_16_J11 with gene ID 182_16_J11_2 that is related to aromatic hydrocarbon degradation is overexpressed in Eschrichia coli. In another example, a copper binding protein related to a polypeptide from fosmid ID 182_08_C21 was expressed in Eschrichia coli. In other examples, a genomic island spanning from approximately 169-6997 on fosmid 182_35_O20 could be expressed in Eschrichia coli. The polypeptides from E. coli cells harboring the genomic island can be extracted and used to modify a heterogeneous aromatic polymer to improve cellulose conversion. In some embodiments, the genomic islands or resulting polypeptides are modified to change the level of expression in the host organism. These modifications include, but are not limited to, mutations, nucleotide insertions, gene synthesis and sub cloning. These host organisms harboring genomic islands are grown and one or more of the polypeptides related to this invention are extracted.

[0052] The extracts may include native polypeptides or other molecules from the host organism. In some embodiments, mixtures of extracts are used and the mixture comprises or one or more extracts made from host cells expressing nucleic acids of the invention and optionally, extracts made from cells that do not contain a nucleic acid of the invention. In some embodiments, the polypeptides can be released from the host organism by physical or chemical methods. This may include, but is not limited to, the use of organic solvents, surfactants or enzymes such as lysozyme. Enrichment or concentration steps can be conducted using, but is not limited to, affinity chromatography, porous membranes or centrifugation, or other standard and well-known procedures in the art for enriching, separating and/or concentrating desired polypeptides or factors. See, for example, Sambrook et al., Molecular Cloning: A Laboratory Manual, Cold Spring Harbor Laboratory Press, Cold Spring Harbor, N.Y. (1989); Current Protocols in Molecular Biology, Ausubel et al., eds, Green Publishers Inc. and Wiley and Sons, N.Y (1994); Scopes, R. K., Protein Purification: Principles and Practice, Springer Advanced Texts in Chemistry (3^{rd} Ed., 1993), each of which is incorporated by reference in its entirety for all purposes. In one embodiment, the polypeptides from E. coli were released by chemical means that include detergents such as SDS. The soluble polypeptides can subsequently be concentrated and exchanged into alternate buffers. In some embodiments, one or more purified proteins, partially purified proteins, other extracts, and/or small molecule mediators are added to the extracts of the invention. This can include, but is not limited by, bacterial laccases and small molecule mediators such as ABTS. In some embodiments, the extracts are used to modify a heterogeneous aromatic polymer and improve cellulose conversion.

[0053] In some embodiments, the step of lysing a host cell to make an extract comprises lysing the microorganism by using an enzyme. In some embodiments, enzymes for lysing a microorganism are proteases and polysaccharide-degrading enzymes such as hemicellulase (e.g., hemicellulase from Aspergillus niger; Sigma Aldrich, St. Louis, Mo.; #H2125), pectinase (e.g., pectinase from Rhizopus sp.; Sigma Aldrich, St. Louis, Mo.; #P2401), Mannaway 4.0 L (Novozymes), cellulase (e.g., cellulose from Trichoderma viride; Sigma Aldrich, St. Louis, Mo.; #C9422), and driselase (e.g., driselase from Basidiomycetes sp.; Sigma Aldrich, St. Louis, Mo.; #D9515. In some embodiments, the enzymes include for example, a cellulase such as a polysaccharide-degrading enzyme, optionally from Chlorella or a Chlorella virus, or a proteases, such as Streptomyces griseus protease, chymotrypsin, proteinase K, proteases listed in Degradation of Polylactide by Commercial Proteases, Oda Y et al., Journal of Polymers and the Environment, Volume 8, Number 1, January 2000, pp. 29-32(4), Alcalase 2.4 FG (Novozymes), and Flavourzyme 100 L (Novozymes), Oda et al is hereby incorporated by reference in its entirety for all purposes. Any combination of a protease and a polysaccharide-degrading enzyme can also be used, including any combination of the preceding proteases and polysaccharide-degrading enzymes.

[0054] In some embodiments, lysis is performed using an expeller press. In this process, host cells are forced through a screw-type device at high pressure, lysing the cells and causing the intracellular contents of the host cells to be released and separated from the membranes and fiber (and other components) in the cell.

[0055] In some embodiments, the step of lysing the host cell is performed by using ultrasound, i.e., sonication. Thus, host cells can also be lysed with high frequency sound. The sound can be produced electronically and transported through a metallic tip to an appropriately concentrated cellular suspension. This sonication (or ultrasonication) disrupts cellular integrity based on the creation of cavities in the cell suspension.

[0056] In some embodiments, the step of lysing the host cells is performed by mechanical lysis. Host cells can be lysed mechanically and optionally homogenized to facilitate extract collection. For example, a pressure disrupter can be used to pump a host cell containing slurry through a restricted orifice valve. High pressure (up to 1500 bar) is applied, followed by an instant expansion through an exiting nozzle. Host cell disruption is accomplished by three different mechanisms: impingement on the valve, high liquid shear in the orifice, and sudden pressure drop upon discharge, causing an explosion of the host cell. The method releases intracellular molecules. Alternatively, a ball mill can be used. In a ball mill, host cells are agitated in suspension with small abrasive particles, such as beads. Host cells break because of shear forces, grinding between beads, and collisions with beads. The beads disrupt the host cells to release cellular contents. Host cells can also be disrupted by shear forces, such as with the use of blending (such as with a high speed or Waring blender as examples), the French press, or even centrifugation in case of weak cell walls, to disrupt host cells. In some embodiments, the step of lysing a host cell is performed by applying an osmotic shock.

[0057] In some embodiments, the step of lysing a microorganism comprises infecting the host cell with a lytic virus. A wide variety of viruses are known to lyse host cells of the invention and are suitable for use in the present invention. The selection and use of a particular lytic virus for a particular host cell is within the level of skill in the art. For example, paramecium bursaria chlorella virus (PBCV-1) is the prototype of a group (family Phycodnaviridae, genus Chlorovirus) of large, icosahedral, plaque-forming, double-stranded DNA viruses that replicate in, and lyse, certain unicellular, eukaryotic chlorella-like green algae. Accordingly, any susceptible microalgae can be lysed by infecting the culture with a suitable chlorella virus. Methods of infecting species of Chlorella with a chlorella virus are known. See for example Adv. Virus Res. 2006; 66:293-336; Virology, 1999 Apr. 25; 257(1):15-23; Virology, 2004 Jan. 5; 318(1):214-23; Nucleic Acids Symp. Ser. 2000; (44):161-2; J. Virol. 2006 March; 80(5):2437-44; and Annu. Rev. Microbiol. 1999; 53:447-94, all of which are hereby incorporated by reference in their entirety for all purposes.

[0058] In some embodiments, the step of lysing a host cell comprises autolysis. In this embodiment, a host cell is genetically engineered to produce a lytic protein that will lyse the host cell at a desired time. This lytic gene can be expressed using an inducible promoter so that the cells can first be grown to a desirable density in a incubator or other container, followed by induction of the promoter to express the lytic gene to lyse the cells. In one embodiment, the lytic gene encodes a polysaccharide-degrading enzyme. In certain other embodiments, the lytic gene is a gene from a lytic virus. Thus, for example, a lytic gene from a Chlorella virus can be expressed in an algal cell; see Virology 260, 308-315 (1999); FEMS Microbiology Letters 180 (1999) 45-53; Virology 263, 376-387 (1999); and Virology 230, 361-368 (1997), all of which are hereby incorporated by reference in their entirety for all purposes. Expression of lytic genes is preferably done using an inducible promoter, such as a promoter active in the host cell that is induced by a stimulus such as the presence of a small molecule, light, heat, and other stimuli.

[0059] In some embodiments, the polynucleotides and/or polypeptides are modified to change the level of expression in the host organism. These modifications include, but are not limited to, mutations, nucleotide insertions, gene synthesis and sub cloning.

[0060] The polypeptides of the invention also include polypeptides that are substantially equivalent to the polypeptides of the invention. In some embodiments, polypeptides according to the invention have at least about 80%, or at least about 90%, or at least about 95%, sequence identity to a polypeptide of the invention. In some embodiments, the invention also includes polypeptides that have homology of at least 80%, 81%, 82%, 83%, 84%, 85%, 86%, 87%, 88%, 89%, 90%, 91%, 92%, 93%, 94%, 95%, 96%, 97%, 98%, 99%, 99.5%, 99.6%, or 99.7% identity with the sequence of the polypeptides in Table 1 which are encoded by SEQ ID NOs: 1, 3, 5, 7, 9, 11, 13, 15, 17, 19, 21, 23, 25, 27, 29, 31, 33, 35, 37, 39, 41, 43, 45, 47, 49, 51, 53, 55, 57, 59, 61, 63, 65, 67, 69, 71, 73, 75, and 77-96, or fragments thereof.

[0061] In some embodiments, amino acid “substitutions” for creating variants are preferably the result of replacing one amino acid with another amino acid having similar structural and/or chemical properties, i.e., conservative amino acid replacements. Amino acid substitutions may be made on the basis of similarity in polarity, charge, solubility, hydrophobicity, hydrophilicity, and/or the amphipathic nature of the residues involved. For example, nonpolar (hydrophobic) amino acids include alanine, leucine, isoleucine, valine, proline, phenylalanine, tryptophan, and methionine; polar neutral amino acids include glycine, serine, threonine, cysteine, tyrosine, asparagine, and glutamine; positively charged (basic) amino acids include arginine, lysine, and histidine; and negatively charged (acidic) amino acids include aspartic acid and glutamic acid.

[0062] In some embodiments, substitutions are limited to substitutions in amino acids not conserved among other proteins which have similar identified enzymatic activity. These equivalent amino acids can be determined either by depending on their structural homology with the amino acids which they substitute, or on results of comparative tests of biological activity between the different polypeptides, which are capable of being carried out.

[0063] The present invention likewise relates to isolated and/or purified nucleotide sequences, characterized in that they are selected from: a) a nucleotide sequence of one of SEQ ID NOs: 1, 3, 5, 7, 9, 11, 13, 15, 17, 19, 21, 23, 25, 27, 29, 31, 33, 35, 37, 39, 41, 43, 45, 47, 49, 51, 53, 55, 57, 59, 61, 63, 65, 67, 69, 71, 73, 75, or 77-96, or one of their fragments; b) a nucleotide sequence homologous to a nucleotide sequence such as defined in a); c) a nucleotide sequence complementary to a nucleotide sequence such as defined in a) or b), and a nucleotide sequence of their corresponding RNA; d) a nucleotide sequence capable of hybridizing under stringent conditions with a sequence such as defined in a), b) or c); e) a nucleotide sequence comprising a sequence such as defined in a), b), c) or d); and f) a nucleotide sequence modified by a nucleotide sequence such as defined in a), b), c), d) or e).

[0064] In some embodiments, it may be desirable to modify the polypeptides of the present invention. One of skill will recognize many ways of generating alterations in a given nucleic acid construct to generate variant polypeptides. Such well-known methods include site-directed mutagenesis, PCR amplification using degenerate oligonucleotides, exposure of cells containing the nucleic acid to mutagenic agents or radiation, chemical synthesis of a desired oligonucleotide (e.g., in conjunction with ligation and/or cloning to generate large nucleic acids) and other well-known techniques (see, e.g., Gillam and Smith, Gene 8:81-97, 1979; Roberts et al., Nature 328:731-734, 1987, both of which are incorporated by reference in their entirety for all purposes).

[0065] Nucleic acids which encode protein analogs or variants in accordance with this invention (i.e., wherein one or more amino acids are designed to differ from the wild type polypeptide) may be produced using site directed mutagenesis or PCR amplification in which the primer(s) have the desired point mutations. For a detailed description of suitable mutagenesis techniques, see Sambrook et al., Molecular Cloning: A Laboratory Manual, Cold Spring Harbor Laboratory Press, Cold Spring Harbor, N.Y. (1989) and/or Current Protocols in Molecular Biology, Ausubel et al., eds, Green Publishers Inc. and Wiley and Sons, N.Y (1994), each of which is incorporated by reference in its entirety for all purposes. Chemical synthesis using methods well known in the art, such as that described by Engels et al., Angew Chem Intl Ed. 28:716-34, 1989 (which is incorporated by reference in its entirety for all purposes), may also be used to prepare such nucleic acids. In some embodiments, the recombinant nucleic acids encoding the polypeptides of the invention are modified to provide preferred codons which enhance translation of the nucleic acid in a selected organism.

[0066] A number of exemplary methods have been developed for the mutagenesis and diversification of polynucleotides encoding polypeptides to target desired properties of specific polypeptides. Such methods are well known to those skilled in the art. Any of these can be used to alter and/or optimize the activity of a lignin utilization polypeptide of the invention. Such methods include, but are not limited to EpPCR, which introduces random point mutations by reducing the fidelity of DNA polymerase in PCR reactions (Pritchard et al., J Theor. Biol. 234:497-509 (2005)); Error-prone Rolling Circle Amplification (epRCA), which is similar to epPCR except a whole circular plasmid is used as the template and random 6-mers with exonuclease resistant thiophosphate linkages on the last 2 nucleotides are used to amplify the plasmid followed by transformation into cells in which the plasmid is re-circularized at tandem repeats (Fujii et al., Nucleic Acids Res. 32:e145 (2004); and Fujii et al., Nat. Protoc. 1:2493-2497 (2006)); DNA or Family Shuffling, which typically involves digestion of two or more variant genes with nucleases such as Dnase I or EndoV to generate a pool of random fragments that are reassembled by cycles of annealing and extension in the presence of DNA polymerase to create a library of chimeric genes (Stemmer, Proc Natl Acad Sci USA 91:10747-10751 (1994); and Stemmer, Nature 370:389-391 (1994)); Staggered Extension (StEP), which entails template priming followed by repeated cycles of 2 step PCR with denaturation and very short duration of annealing/extension (as short as 5 sec) (Zhao et al., Nat. Biotechnol. 16:258-261 (1998)); Random Priming Recombination (RPR), in which random sequence primers are used to generate many short DNA fragments complementary to different segments of the template (Shao et al., Nucleic Acids Res 26:681-683 (1998)).

[0067] Additional methods include Heteroduplex Recombination, in which linearized plasmid DNA is used to form heteroduplexes that are repaired by mismatch repair (Volkov et al, Nucleic Acids Res. 27:e18 (1999); and Volkov et al., Methods Enzymol. 328:456-463 (2000)); Random Chimeragenesis on Transient Templates (RACHITT), which employs Dnase I fragmentation and size fractionation of single stranded DNA (ssDNA) (Coco et al., Nat. Biotechnol. 19:354-359 (2001)); Recombined Extension on Truncated templates (RETT), which entails template switching of unidirectionally growing strands from primers in the presence of unidirectional ssDNA fragments used as a pool of templates (Lee et al., J. Molec. Catalysis 26:119-129 (2003)); Degenerate Oligonucleotide Gene Shuffling (DOGS), in which degenerate primers are used to control recombination between molecules; (Bergquist and Gibbs, Methods Mol. Biol. 352:191-204 (2007); Bergquist et al., Biomol. Eng 22:63-72 (2005); Gibbs et al., Gene 271:13-20 (2001)); Incremental Truncation for the Creation of Hybrid Enzymes (ITCHY), which creates a combinatorial library with 1 base pair deletions of a gene or gene fragment of interest (Ostermeier et al., Proc. Natl. Acad. Sci. USA 96:3562-3567 (1999); and Ostermeier et al., Nat. Biotechnol. 17:1205-1209 (1999)); Thio-Incremental Truncation for the Creation of Hybrid Enzymes (THIO-ITCHY), which is similar to ITCHY except that phosphothioate dNTPs are used to generate truncations (Lutz et al., Nucleic Acids Res 29:E16 (2001)); SCRATCHY, which combines two methods for recombining genes, ITCHY and DNA shuffling (Lutz et al., Proc. Natl. Acad. Sci. USA 98:11248-11253 (2001)); Random Drift Mutagenesis (RNDM), in which mutations made via epPCR are followed by screening/selection for those retaining usable activity (Bergquist et al., Biomol. Eng. 22:63-72 (2005)); Sequence Saturation Mutagenesis (SeSaM), a random mutagenesis method that generates a pool of random length fragments using random incorporation of a phosphothioate nucleotide and cleavage, which is used as a template to extend in the presence of “universal” bases such as inosine, and replication of an inosine-containing complement gives random base incorporation and, consequently, mutagenesis (Wong et al., Biotechnol. J. 3:74-82 (2008); Wong et al., Nucleic Acids Res. 32:e26 (2004); and Wong et al., Anal. Biochem. 341:187-189 (2005)); Synthetic Shuffling, which uses overlapping oligonucleotides designed to encode “all genetic diversity in targets” and allows a very high diversity for the shuffled progeny (Ness et al., Nat. Biotechnol. 20:1251-1255 (2002)); Nucleotide Exchange and Excision Technology NexT, which exploits a combination of dUTP incorporation followed by treatment with uracil DNA glycosylase and then piperidine to perform endpoint DNA fragmentation (Muller et al., Nucleic Acids Res. 33:e117 (2005)).

[0068] Further methods include Sequence Homology-Independent Protein Recombination (SHIPREC), in which a linker is used to facilitate fusion between two distantly related or unrelated genes, and a range of chimeras is generated between the two genes, resulting in libraries of single-crossover hybrids (Sieber et al., Nat. Biotechnol. 19:456-460 (2001)); Gene Site Saturation Mutagenesis™ (GSSM™), in which the starting materials include a supercoiled double stranded DNA (dsDNA) plasmid containing an insert and two primers which are degenerate at the desired site of mutations (Kretz et al., Methods Enzymol. 388:3-11 (2004)); Combinatorial Cassette Mutagenesis (CCM), which involves the use of short oligonucleotide cassettes to replace limited regions with a large number of possible amino acid sequence alterations (Reidhaar-Olson et al. Methods Enzymol. 208:564-586 (1991); and Reidhaar-Olson et al. Science 241:53-57 (1988)); Combinatorial Multiple Cassette Mutagenesis (CMCM), which is essentially similar to CCM and uses epPCR at high mutation rate to identify hot spots and hot regions and then extension by CMCM to cover a defined region of protein sequence space (Reetz et al., Angew. Chem. Int. Ed Engl. 40:3589-3591 (2001)); the Mutator Strains technique, in which conditional is mutator plasmids, utilizing the mutD5 gene, which encodes a mutant subunit of DNA polymerase III, to allow increases of 20 to 4000-X in random and natural mutation frequency during selection and block accumulation of deleterious mutations when selection is not required (Selifonova et al., Appl. Environ. Microbiol. 67:3645-3649 (2001)); Low et al., J. Mol. Biol. 260:359-3680 (1996)).

[0069] Additional exemplary methods include Look-Through Mutagenesis (LTM), which is a multidimensional mutagenesis method that assesses and optimizes combinatorial mutations of selected amino acids (Rajpal et al., Proc. Natl. Acad. Sci. USA 102:8466-8471 (2005)); Gene Reassembly, which is a DNA shuffling method that can be applied to multiple genes at one time or to create a large library of chimeras (multiple mutations) of a single gene (Tunable GeneReassembly™ (TGR™) Technology supplied by Verenium Corporation), in Silico Protein Design Automation (PDA), which is an optimization algorithm that anchors the structurally defined protein backbone possessing a particular fold, and searches sequence space for amino acid substitutions that can stabilize the fold and overall protein energetics, and generally works most effectively on proteins with known three-dimensional structures (Hayes et al., Proc. Natl. Acad. Sci. USA 99:15926-15931 (2002)); and Iterative Saturation Mutagenesis (ISM), which involves using knowledge of structure/function to choose a likely site for enzyme improvement, performing saturation mutagenesis at chosen site using a mutagenesis method such as Stratagene QuikChange (Stratagene; San Diego Calif.), screening/selecting for desired properties, and, using improved clone(s), starting over at another site and continue repeating until a desired activity is achieved (Reetz et al., Nat. Protoc. 2:891-903 (2007); and Reetz et al., Angew. Chem. Int. Ed Engl. 45:7745-7751 (2006)).

[0070] The polynucleotides of the invention also include polynucleotides including nucleotide sequences that are substantially equivalent to the polynucleotides of the invention. Polynucleotides according to the invention can have at least about 80%, more typically at least about 90%, and even more typically at least about 95%, sequence identity to a polynucleotide of the invention. The invention also provides the complement of the polynucleotides including a nucleotide sequence that has at least about 80%, more typically at least about 90%, and even more typically at least about 95%, sequence identity to a polynucleotide encoding a polypeptide recited above. The invention also includes polynucleotides that have homology of at least 80%, 81%, 82%, 83%, 84%, 85%, 86%, 87%, 88%, 89%, 90%, 91%, 92%, 93%, 94%, 95%, 96%, 97%, 98%, 99%, 99.5%, 99.6%, or 99.7% identity with the sequence SEQ ID NOs: 1, 3, 5, 7, 9, 11, 13, 15, 17, 19, 21, 23, 25, 27, 29, 31, 33, 35, 37, 39, 41, 43, 45, 47, 49, 51, 53, 55, 57, 59, 61, 63, 65, 67, 69, 71, 73, 75, or 77-96, or fragments thereof. The polynucleotide can be DNA (genomic, cDNA, amplified, or synthetic) or RNA. Methods and algorithms for obtaining such polynucleotides are well known to those of skill in the art and can include, for example, methods for determining hybridization conditions which can routinely isolate polynucleotides of the desired sequence identities.

### Nucleic Acids

[0071] In some embodiments, the present invention relates to the nucleic acids that encode, at least in part, the individual peptides, polypeptides, proteins, and groups of polypeptides of the present invention. In some embodiments, the nucleic acids may be natural, synthetic or a combination thereof. The nucleic acids of the invention may be RNA, mRNA, DNA or cDNA.

[0072] In some embodiments, the nucleic acids of the invention also include expression vectors, such as plasmids, or viral vectors, or linear vectors, or vectors that integrate into chromosomal DNA. Expression vectors can contain a nucleic acid sequence that enables the vector to replicate in one or more selected host cells. Such sequences are well known for a variety of cells. E.g., the origin of replication from the plasmid pBR322 is suitable for most Gram-negative bacteria. In eukaryotic host cells, e.g., mammalian cells, the expression vector can be integrated into the host cell chromosome and then the vector replicates with the host chromosome. Similarly, vectors can be integrated into the chromosome of prokaryotic cells.

[0073] In general, expression vectors containing replicon and control sequences that are derived from species compatible with the host cell are used in connection with a suitable host cell. The expression vector ordinarily carries a replication site, as well as marking sequences that are capable of providing phenotypic selection in transformed cells. For example, E. coli is typically transformed using pBR322, a plasmid derived from an E. coli species (see, e.g., Bolivar et al., (1977) Gene, 2: 95). pBR322 contains genes for ampicillin and tetracycline resistance and thus provides easy means for identifying transformed cells.

[0074] Expression vectors also generally contain a selection gene, also termed a selectable marker. Selectable markers are well-known in the art for prokaryotic and eukaryotic cells, including host cells of the invention. Generally, the selection gene encodes a protein necessary for the survival or growth of transformed host cells grown in a selective culture medium. Host cells not transformed with the vector containing the selection gene will not survive in the culture medium. Typical selection genes encode proteins that (a) confer resistance to antibiotics or other toxins, e.g., ampicillin, neomycin, methotrexate, or tetracycline, (b) complement auxotrophic deficiencies, or (c) supply critical nutrients not available from complex media, e.g., the gene encoding D-alanine racemase for Bacilli. In some embodiments, an exemplary selection scheme utilizes a drug to arrest growth of a host cell. Those cells that are successfully transformed with a heterologous gene produce a protein conferring drug resistance and thus survive the selection regimen. Other selectable markers for use in bacterial or eukaryotic (including mammalian) systems are well-known in the art.

[0075] The expression vector for producing the polypeptides of the invention contain a suitable control region that is recognized by the host organism and is operably linked to the nucleic acid encoding the polypeptide of interest. Promoters used in the constructs of the invention include cis-acting transcriptional control elements and regulatory sequences that are involved in regulating or modulating the timing and/or rate of transcription of a gene. For example, a promoter can be a cis-acting transcriptional control element, including an enhancer, a promoter, a transcription terminator, an origin of replication, a chromosomal integration sequence, 5′ and 3′ untranslated regions, or an intronic sequence, which are involved in transcriptional regulation. These cis-acting sequences can interact with proteins or other biomolecules to carry out (turn on/off, regulate, modulate, etc.) transcription. “Constitutive” promoters are those that drive expression continuously under most environmental conditions and states of development or cell differentiation. “Inducible” or “regulatable” promoters direct expression of the nucleic acid of the invention under the influence of environmental conditions or developmental conditions. Examples of environmental conditions that may affect transcription by inducible promoters include anaerobic conditions, elevated temperature, drought, or the presence of light.

[0076] Promoters suitable for use with prokaryotic hosts include the beta-lactamase and lactose promoter systems (Chang et al., (1978) Nature, 275: 615; Goeddel et al., (1979) Nature, 281: 544), the arabinose promoter system (Guzman et al., (1992) J. Bacteriol., 174: 7716-7728), alkaline phosphatase, a tryptophan (trp) promoter system (Goeddel, (1980) Nucleic Acids Res., 8: 4057 and EP 36,776) and hybrid promoters such as the tac promoter (deBoer et al., (1983) Proc. Natl. Acad. Sci. USA, 80: 21-25). Other exemplary bacterial promoters include lad, lacZ, T3, T7, gpt, lambda PR, and PL. Other bacterial promoters suitable for expression vectors are also well known in the art. Exemplary eukaryotic promoters include CMV immediate early, HSV thymidine kinase, early and late SV40, LTRs from retrovirus, and mouse metallothionein I. The nucleotide sequences of these and many other promoters have been published, thereby enabling a skilled worker operably to ligate them to DNA encoding the polypeptide of interest (Siebenlist et al, (1980) Cell, 20: 269) using linkers or adaptors to supply any required restriction sites. See also, e.g., Sambrook et al., Molecular Cloning: A Laboratory Manual, Cold Spring Harbor Laboratory Press, Cold Spring Harbor, N.Y. (1989); and Current Protocols in Molecular Biology, Ausubel et al., eds, Green Publishers Inc. and Wiley and Sons, N.Y (1994), both of which are incorporated by reference in their entirety for all purposes.

[0077] Control regions for use in bacterial systems also generally contain a Shine-Dalgarno (S.D.) sequence operably linked to the DNA encoding the polypeptide of interest. The Shine-Dalgarno sequence and the initiating ATG codon are used in the initiation of translation by the ribosome in bacterial systems.

[0078] Expression vectors of the invention typically have promoter elements, e.g., enhancers, to regulate the frequency of transcriptional initiation. Typically, these are located in the region 30-110 base pairs upstream of the start site, although a number of promoters have been shown to contain functional elements downstream of the start site as well. The spacing between promoter elements frequently is flexible, so that promoter function is preserved when elements are inverted or moved relative to one another. In the thymidine kinase (tk) promoter, the spacing between promoter elements can be increased to 50 base pairs apart before activity begins to decline. Depending on the promoter, it appears that individual elements can function either cooperatively or independently to activate transcription.

[0079] The present invention also provides nucleic acids that encode the polypeptides of the invention. The nucleic acid encoding a polypeptide of the invention can be easily prepared from an amino acid sequence of the polypeptide of interest using the genetic code. The nucleic acid encoding a polypeptide of the present invention can be prepared using a standard molecular biological and/or chemical procedure. For example, based on the base sequence, a nucleic acid can be synthesized, and the nucleic acid of the present invention can be prepared by combining DNA fragments which are obtained from a cell or other nucleic acid using a polymerase chain reaction (PCR).

[0080] The nucleic acid of the present invention can be linked to another nucleic acid so as to be expressed under control of a suitable promoter. The nucleic acid of the present invention can be also linked to, in order to attain efficient transcription of the nucleic acid, other regulatory elements that cooperate with a promoter or a transcription initiation site, for example, a nucleic acid comprising an enhancer sequence, or a terminator sequence. In addition to the nucleic acid of the present invention, a gene that can be a marker for confirming expression of the nucleic acid (e.g. a drug resistance gene, a gene encoding a reporter enzyme, or a gene encoding a fluorescent protein) may be incorporated.

[0081] When the nucleic acid of the present invention is introduced into a host cell, the nucleic acid of the present invention may be combined with a substance that promotes transference of a nucleic acid into a cell, for example, a reagent for introducing a nucleic acid such as a liposome or a cationic lipid, in addition to the aforementioned excipients. Alternatively, a vector carrying the nucleic acid of the present invention is also useful.

### Host Cells

[0082] In the present invention, various host cells can be used with the polynucleotides and polypeptides of the invention. The host cell may be any of the host cells familiar to those skilled in the art, including prokaryotic cells, eukaryotic cells, such as bacterial cells, fungal cells, yeast cells, mammalian cells, insect cells, or plant cells. Suitable prokaryotic host cells for expression of the polypeptide of the invention are well known in the art. Suitable prokaryote host cells include bacteria, e.g., eubacteria, such as Gram-negative or Gram-positive organisms, for example, any species of Acidovorax, Agrobacterium, Alicyclobacillus, Anabaena, Anacystis, Arthrobacter, Azobacter, Bacillus, Brevibacterium, Chromatium, Clostridium, Corynebacterium, Enterobacter, Erwinia, Escherichia, Lactobacillus, Lactococcus, Mesorhizobium, Methylobacterium, Microbacterium, Phormidium, Pseudomonas, Rhodobacter, Rhodopseudomonas, Rhodospirillum, Rhodococcus, Salmonella, Scenedesmun, Serratia, Shigella, Staphylococcus, Strepromyces, Synnecoccus, and Zymomonas, including, e.g., E. coli, B. subtilis, P. aeruginosa, Salmonella typhimurium, Bacillus cereus, Pseudomonas fluorescens, Serratia marcescens, Clostridium acetobutylicum, Clostridium Beijerinckii, Clostridium saccharoperbutylacetonicum, Clostridium saccharobutylicum, Clostridium aurantibutyricum, or Clostridium tetanomorphum.

[0083] One example of an E. coli host is E. coli 294 (ATCC 31,446). Other strains such as E. coli B, E. coli X1776 (ATCC 31,537), and E. coli W3110 (ATCC 27,325) are also suitable. These examples are illustrative rather than limiting. Strain W3110 is a typical host because it is a common host strain for recombinant DNA product fermentations. In one aspect of the invention, the host cell should secrete minimal amounts of proteolytic enzymes. For example, strain W3110 may be modified to effect a genetic mutation in the genes encoding proteins, with examples of such hosts including E. coli W3110 strains 1A2, 27A7, 27B4, and 27C7 described in U.S. Pat. No. 5,410,026 issued Apr. 25, 1995, which is incorporated by reference in its entirety for all purposes.

[0084] In some embodiments the host cells are plant cells. In some embodiments the plant cells are cells of monocotyledonous or dicotyledonous plants, including, but not limited to, alfalfa, almonds, asparagus, avocado, banana, barley, bean, blackberry, brassicas, broccoli, cabbage, canola, carrot, cauliflower, celery, cherry, chicory, citrus, coffee, cotton, cucumber, eucalyptus, hemp, lettuce, lentil, maize, mango, melon, oat, papaya, pea, peanut, pineapple, plum, potato (including sweet potatoes), pumpkin, radish, rapeseed, raspberry, rice, rye, sorghum, soybean, spinach, strawberry, sugar beet, sugarcane, sunflower, tobacco, tomato, turnip, wheat, zucchini, and other fruiting vegetables (e.g. tomatoes, pepper, chili, eggplant, cucumber, squash etc.), other bulb vegetables (e.g., garlic, onion, leek etc.), other pome fruit (e.g. apples, pears etc.), other stone fruit (e.g., peach, nectarine, apricot, pears, plums etc.), Arabidopsis, woody plants such as coniferous and deciduous trees, an ornamental plant, a perennial grass, a forage crop, flowers, other vegetables, other fruits, other agricultural crops, herbs, grass, or perennial plant parts (e.g., bulbs; tubers; roots; crowns; stems; stolons; tillers; shoots; cuttings, including un-rooted cuttings, rooted cuttings, and callus cuttings or callus-generated plantlets; apical meristems etc.). The term “plants” refers to all physical parts of a plant, including seeds, seedlings, saplings, roots, tubers, stems, stalks, foliage and fruits.

[0085] In other embodiments, the host cells are algal and/or photosynthetic, including but not limited to algae or photosynthetic cells of the genera Agmenellum, Amphora, Anabaena, Ankistrodesmus, Botryococcus, Boekelovia, Borodinella, Botryococcus, Carteria, Chaetoceros, Chlamydomonas, Chlorella, Chlorococcum, Chlorogonium, Chrysosphaera, Cricosphaera, Cryptomonas, Cyclotella, Dunaliella, Ellipsoidon, Eremosphaera, Euglena, Fragilaria, Gleocapsa, Gloeothamnion, Hymenomonas, Isochrysis, Lepocinclis, Monoraphidium, Nannochloris, Nannochloropsis, Navicula, Nephrochloris, Nitschia, Nitzschia, Ochromonas, Oocystis, Oscillatoria, Nitzschia, Pascheria, Phagus, Phormidium, Platymonas, Pleurochrysis Prototheca, Pyrobotrys Scenedesmus, Spirogyra, Tetraedron, Tetraselmis, or Volvox. In some embodiments, the host cell is Botryococcus braunii, Prototheca krugani, Prototheca moriformis, Prototheca portoricensis, Prototheca stagnora, Prototheca wickerhamii, or Prototheca zopfii.

[0086] In some embodiments, the eukaryotic cells are fungi cells, including, but not limited to, fungi of the genera Aspergillus, Candida, Chlamydomonas, Chrysosporium, Cryotococcus, Debaromyces, Fusarium, Hansenula, Kluyveromyces, Neotyphodium, Neurospora, Penicillium, Pichia, Saccharomyces, Schizosaccharomyce, Trichoderma, Xanthophyllomyces, Yarrowia, and Zygosaccharomyces. Exemplary fungi cells include Saccharomyces cerevisiae, Saccharomyces carlsbergensis, Saccharomyces lactis, Schizosaccharomyces pompe, Kluyveromyces lactis, Pichia pastoris, Hansenula polymorpha, or filamentous fungi, e.g. Trichoderma, Aspergillus sp., including Aspergillus niger, Aspergillus phoenicis, Aspergillus carbonarius.

[0087] Exemplary insect cells include any species of Spodoptera or Drosophila, including Drosophila S2 and Spodoptera Sf9. Exemplary animal cells include CHO, COS or Bowes melanoma or any appropriate mouse or human cell line known to person of skill in the art.

### Introduction of Polynucleotides to Host Cells

[0088] In some embodiments, the nucleic acids encoding the lignin utilizing polypeptides of the present invention is/are inserted into a vector(s), and the vector(s) is introduced into a cell. In some embodiments, the nucleic acid(s) encoding the lignin utilizing polypeptides is/are introduced to the eukaryotic cell by transfection (e.g., Gorman, et al. Proc. Natl. Acad. Sci. 79.22 (1982): 6777-6781; which is incorporated by reference in its entirety for all purposes), transduction (e.g., Cepko and Pear (2001) Current Protocols in Molecular Biology unit 9.9; DOI: 10.1002/0471142727.mb0909s36, which is incorporated by reference in its entirety for all purposes), calcium phosphate transformation (e.g., Kingston, Chen and Okayama (2001) Current Protocols in Molecular Biology Appendix 1C; DOI: 10.1002/0471142301.nsa01cs01, which is incorporated by reference in its entirety for all purposes), cell-penetrating peptides (e.g., Copolovici, Langel, Eriste, and Langel (2014) ACS Nano 2014 8 (3), 1972-1994; DOI: 10.1021/nn4057269, which is incorporated by reference in its entirety for all purposes), electroporation (e.g Potter (2001) Current Protocols in Molecular Biology unit 10.15; DOI: 10.1002/0471142735.im1015s03 and Kim et al (2014) Genome 1012-19. doi:10.1101/gr.171322.113, Kim et al. 2014 describe the Amaza Nucleofector, an optimized electroporation system, both of these references are incorporated by reference in their entirety for all purposes), microinjection (e.g., McNeil (2001) Current Protocols in Cell Biology unit 20.1; DOI: 10.1002/0471143030.cb2001s18, which is incorporated by reference in its entirety for all purposes), liposome or cell fusion (e.g., Hawley-Nelson and Ciccarone (2001) Current Protocols in Neuroscience Appendix 1F; DOI: 10.1002/0471142301.nsa01fs10, which is incorporated by reference in its entirety for all purposes), mechanical manipulation (e.g. Sharon et al. (2013) PNAS 2013 110(6); DOI: 10.1073/pnas.1218705110, which is incorporated by reference in its entirety for all purposes) or other well-known technique for delivery of nucleic acids to eukaryotic cells. Once introduced, the nucleic acids of the invention can be transiently expressed episomally, or can be integrated into the genome of the host cell using well known techniques such as recombination (e.g., Lisby and Rothstein (2015) Cold Spring Harb Perspect Biol. March 2; 7(3). pii: a016535. doi: 10.1101/cshperspect.a016535, which is incorporated by reference in its entirety for all purposes), or non-homologous integration (e.g., Deyle and Russell (2009) Curr Opin Mol Ther. 2009 August; 11(4):442-7, which is incorporated by reference in its entirety for all purposes). The efficiency of homologous and non-homologous recombination can be facilitated by genome editing technologies that introduce targeted double-stranded breaks (DSB). Examples of DSB-generating technologies are CRISPR/Cas9, TALEN, Zinc-Finger Nuclease, or equivalent systems (e.g., Cong et al. Science 339.6121 (2013): 819-823, Li et al. Nucl. Acids Res (2011): gkr188, Gajet al. Trends in Biotechnology 31.7 (2013): 39.7-405, all of which are incorporated by reference in their entirety for all purposes), transposons such as Sleeping Beauty (e.g., Singh et al (2014) Immunol Rev. 2014 January; 257(1):181-90. doi: 10.1111/imr.12137, which is incorporated by reference in its entirety for all purposes), targeted recombination using, for example, FLP recombinase (e.g., O'Gorman, Fox and Wahl Science (1991) 15:251(4999):1351-1355, which is incorporated by reference in its entirety for all purposes), CRE-LOX (e.g., Sauer and Henderson PNAS (1988): 85; 5166-5170), or equivalent systems, or other techniques known in the art for integrating the nucleic acids of the invention into the eukaryotic cell genome.

[0089] Chemical means for introducing a polynucleotide into a host cell include colloidal dispersion systems, such as macromolecule complexes, nanocapsules, microspheres, beads, and lipid-based systems including oil-in-water emulsions, micelles, mixed micelles, and liposomes. An exemplary colloidal system for use as a delivery vehicle in vitro and in vivo is a liposome (e.g., an artificial membrane vesicle). Other methods of state-of-the-art targeted delivery of nucleic acids are available, such as delivery of polynucleotides with targeted nanoparticles or other suitable sub-micron sized delivery system.

[0090] Techniques for transforming a wide variety of higher plant species are well known and described in the technical and scientific literature. See, e.g., Weising (1988) Ann. Rev. Genet. 22:421-477; U.S. Pat. No. 5,750,870, which are both incorporated by reference in their entirety for all purposes.

### Uses of Polynucleotides, Polypeptides and Extracts

[0091] In some embodiments, the polypeptides and/or polynucleotides of the invention are used in industrial processes in a variety of forms, including cell-based systems and/or as partially or substantially purified forms, or in mixtures or other formulations. In one aspect, commercial (e.g., “upscaled”) enzyme production systems are used, and this invention can use any polypeptide production system known in the art, including any cell-based expression system, which include numerous strains, including any eukaryotic or prokaryotic system, including any insect, microbial, yeast, bacterial and/or fungal expression system; these alternative expression systems are well known and discussed in the literature and all are contemplated for commercial use for producing and using the enzymes of the invention. For example, Bacillus species can be used for industrial production (see, e.g., Canadian Journal of Microbiology, 2004 January, 50(1):1-17, which is incorporated by reference in its entirety for all purposes). Alternatively, Streptomyces species, such as S. lividans, S. coelicolor, S. limosus, S. rimosus, S. roseosporus, and S. lividans can be used for industrial and sustainable production hosts (see, e.g., Appl Environ Microbiol. 2006 August; 72(8): 5283-5288, which is incorporated by reference in its entirety for all purposes). Any Fusarium sp. can be used in an expression system to practice this invention, including e.g., Fusarium graminearum; see e.g., Royer et al. Bio/Technology 13:1479-1483 (1995), which is incorporated by reference in its entirety for all purposes. Any Aspergillus sp. can be used in an expression system to practice this invention, including e.g., A. nidulans; A. fumigatus; Aspergillus phoenicis, A. niger, A. carbonarius, or A. oryzae; the genome for A. niger CB S513.88, a parent of commercially used enzyme production strains, was recently sequenced (see, e.g., Nat Biotechnol. 2007 February; 25(2):221-31; World Journal of Microbiology and Biotechnology, 2001, 17(5):455-461, both of which are incorporated by reference in their entirety for all purposes). Similarly, the genomic sequencing of Aspergillus oryzae was recently completed (Nature. 2005 Dec. 22; 438(7071):1157-61, which is incorporated by reference in its entirety for all purposes). For alternative fungal expression systems that can be used to practice this invention, e.g., to express enzymes for use in industrial applications, such as biofuel production, see e.g., Advances in Fungal Biotechnology for Industry, Agriculture, and Medicine. Edited by Jan S. Tkacz & Lene Lange. 2004. Kluwer Academic & Plenum Publishers, New York; and e.g., Handbook of Industrial Mycology. Edited by Zhiqiang An. 24 Sep. 2004. Mycology Series No. 22. Marcel Dekker, New York; and e.g., Talbot (2007) “Fungal genomics goes industrial”, Nature Biotechnology 25(5):542; and in U.S. Pat. Nos. 4,885,249; 5,866,406; and international patent publication WO/2003/012071, all of which are incorporated by reference in their entirety for all purposes.

[0092] The invention provides a method for expressing recombinant lignin utilizing polypeptides, e.g., the polypeptides of SEQ ID NOS: 2, 4, 6, 8, 10, 12, 14, 16, 18, 1-20, 22, 24, 26, 28, 30, 32, 34, 36, 38, 40, 42, 44, 46, 48, 50, 52, 54, 56, 58, 60, 62, 64, 66, 68, 70, 72, 74, or 76, and the sets of polypeptides in Table 3 which are encoded by SEQ ID NOS: 77-96 in a cell comprising expressing the polypeptides in a nucleic acid of the invention, e.g., a nucleic acid comprising a nucleic acid sequence with at least about 50%, 51%, 52%, 53%, 54%, 55%, 56%, 57%, 58%, 59%, 60%, 61%, 62%, 63%, 64%, 65%, 66%, 67%, 68%, 69%, 70%, 71%, 72%, 73%, 74%, 75%, 76%, 77%, 78%, 79%, 80%, 81%, 82%, 83%, 84%, 85%, 86%, 87%, 88%, 89%, 90%, 91%, 92%, 93%, 94%, 95%, 96%, 97%, 98%, 99%, or more sequence identity to SEQ ID NOs: 1, 3, 5, 7, 9, 11, 13, 15, 17, 19, 21, 23, 25, 27, 29, 31, 33, 35, 37, 39, 41, 43, 45, 47, 49, 51, 53, 55, 57, 59, 61, 63, 65, 67, 69, 71, 73, 75, or 77-96 or an exemplary sequence of the invention over a region of at least about 100 residues, wherein the sequence identities are determined by analysis with a sequence comparison algorithm or by visual inspection, or, a nucleic acid that hybridizes under stringent conditions to a nucleic acid sequence of the invention. The expression can be effected by any means, including e.g., use of a high activity promoter, a dicistronic vector or by gene amplification of the vector.

[0093] Cells can be harvested by centrifugation, disrupted by physical or chemical means and the resulting crude extract is retained for further purification. Microbial cells employed for expression of proteins can be disrupted by any convenient method, including freeze-thaw cycling, sonication, mechanical disruption, or use of cell lysing agents. Such methods are well known to those skilled in the art. The expressed polypeptide or fragment thereof can be recovered and purified from recombinant cell cultures by methods including ammonium sulfate or ethanol precipitation, acid extraction, anion or cation exchange chromatography, phosphocellulose chromatography, hydrophobic interaction chromatography, affinity chromatography, hydroxylapatite chromatography and lectin chromatography. Protein refolding steps can be used, as necessary, in completing configuration of the polypeptide. If desired, high performance liquid chromatography (HPLC) can be employed for final purification steps.

[0094] In some embodiments, polypeptides and methods for utilization of lignin are used in polypeptide ensembles (“mixtures” or “cocktails”) for the efficient hydrolysis (e.g., depolymerization) of lignin to metabolizeable carbon moieties, including sugars, alcohols, other molecules of intermediate metabolism, and/or other precursor chemicals. Exemplary polypeptide cocktails are described herein; however, the invention encompasses compositions comprising mixtures of polypeptides comprising at least one polypeptide of the invention; and in some embodiments, a mixture (“ensembles” or “cocktails”) of the invention can also comprise any other polypeptide of the invention, and the like. As discussed above, the invention provides methods for discovering and implementing the most effective combination of polypeptides of the invention to enable new “biomass conversion”, “biomass processing”, alternative energy, biofuel production, and/or industrial processes.

[0095] In some embodiments, nucleic acids and polypeptides of the invention having lignin utilizing activity are used in processes for converting lignin biomass to sugar and precursor molecules, which are converted by methods well-known in the art to many products, including for example, biofuels, bioalcohols, synthetic fibers, plastics, rubber, oleochemicals, foods, cosmetics, polymer products, etc. In some embodiments, the sugars made by the methods of the invention include, for example, glucose, galactose, sucrose, fructose, etc. In some embodiments, the methods of the invention produce a bioalcohol such as, for example, biomethanol, bioethanol, biopropanol, bioisopropanol, biobutanol, biopentanol, biodiols (such as propane diols, butane diols, pentane diols, etc.) from compositions comprising lignin biomass. In some embodiments, the methods of the invention produce alkanes, alkenes, dialkenes, or alkynes such as, for example, propene, butene, butadiene, pentene, pentadiene, etc. In some embodiments, the methods of the invention produce oleochemicals such as surfactants, detergents, soaps, cosmetics, lubricants, etc. In some embodiments, the methods of the invention produce foods such as sugars, flours, protein supplements, etc. In some embodiments, the methods of the invention produce biofuels such as, for example, biodiesel, biojet fuel, bioalcohols as fuel additives (e.g., bioethanol), biofuel gasoline, biogas, syngas, bioethers, etc.

[0096] The lignin biomass material can be obtained from herbaceous and woody energy crops, as well as agricultural crops, i.e., the plant parts, primarily stalks and leaves, not removed from the fields with the primary food or fiber product. Examples include agricultural wastes such as sugarcane bagasse, rice hulls, corn fiber (including stalks, leaves, husks, and cobs), wheat straw, rice straw, sugar beet pulp, citrus pulp, citrus peels; forestry wastes such as hardwood and softwood thinnings, and hardwood and softwood residues from timber operations; wood wastes such as saw mill wastes (wood chips, sawdust) and pulp mill waste; urban wastes such as paper fractions of municipal solid waste, urban wood waste and urban green waste such as municipal grass clippings; and wood construction waste. Additional lignin biomass materials include dedicated cellulosic crops such as switchgrass, hybrid poplar wood, and miscanthus, fiber cane, and fiber sorghum. Five-carbon sugars that are produced from such materials include xylose.

[0097] Examples of paper or wood waste suitable for treatment with polypeptides of the invention include discarded or used photocopy paper, computer printer paper, notebook paper, notepad paper, typewriter paper, and the like, as well as newspapers, magazines, cardboard, and paper-based packaging materials and recycled paper materials. In addition, urban wastes, e.g. the paper fraction of municipal solid waste, municipal wood waste, and municipal green waste, along with other materials containing sugar, starch, and/or cellulose can be used.

[0098] The enzymes of the invention used to treat or process the lignin biomass material (e.g., from agricultural crops, food or feed production byproduct, lignin waste products, plant residues, sugarcane bagasse, corn or corn fiber, waste wood or paper, etc.), in addition to being directly added to the material, alternatively can be made by a microorganism (e.g., a virus, plant, yeast, etc.) living on or within the biomass material, or by the biomass material itself, e.g., as a transgenic plant or seed and the like. In some embodiments, microorganisms that produce polypeptides of the invention are added to the biomass material to be processed. These microorganisms can be the sole source of the polypeptide of the invention, or can supplement a cocktail that has polypeptides of the invention in another form (e.g., as either a purified enzyme, or in crude lysate of a culture, such as a bacterial, yeast or insect cell culture, or any other formulation), or to supplement the presence of the polypeptide of the invention as a heterologous recombinant protein in a transgenic plant. In some embodiments, the plant can be engineered to express the enzyme recombinantly by transient infection, transformation or transduction with naked DNA, plasmid, virus and the like. In some embodiments, the enzymes are produced in plants or plant seeds, like corn, and then the enzyme can be isolated from the plant or the plant can be used directly in the process. In some embodiments, the polypeptides of the invention can be added to the treatment process in batches, by fed-batch processes, added continually and/or be recycled during the process. In some embodiments, the cells, polypeptides, and/or extracts of the invention increase utilization of a biomass by separating other components of the biomass (e.g., cellulose) from lignin. In some embodiments, the lignin is chemically transformed into smaller components and this process allows other components in the biomass to be utilized more efficiently and/or more completely. In some embodiments, the lignin is bound or sequestered by polypeptides of the invention and this allows other components of the biomass to be utilized more efficiently and/or more completely.

[0099] The polypeptides described in this invention can be used in the form of a cell extracts and/or supernatants from host organisms. These extracts can further be supplemented with additional extracts, purified proteins or small molecules such as oxidative mediators. Extracts have been used to modify a heterogeneous aromatic polymer. For example, the extracts have been used to modify a heterogeneous aromatic polymer such as lignin in lignocellulose. The modifications have been shown to improve utilization of lignin by decreasing total protein loading, including the amount of cellulases, or boosting glucose yields. In some embodiments, the extracts act on a heterogeneous polymer such as lignin or coal to release aromatic chemicals. In other embodiments, the extracts act on a heterogeneous polymers such as lignin or coal to change properties of the substrates for the production of fibers, resins or materials.

[0100] The inventions disclosed herein will be better understood from the experimental details which follow. However, one skilled in the art will readily appreciate that the specific methods and results discussed are merely illustrative of the inventions as described more fully in the claims which follow thereafter. Unless otherwise indicated, the disclosure is not limited to specific procedures, materials, or the like, as such may vary. It is also to be understood that the terminology used herein is for the purpose of describing particular embodiments only and is not intended to be limiting.

### Examples

### Example 1

### Functional Metagenomic Library Screening for Lignin Utilization

[0101] Metagenomic libraries from CO182 and CO183 were constructed using the Fosmid Copy Control system (pCC1FOS) from EpiCentre, as previous reports suggest that increased copy number enhances heterologous gene expression in the EPI300 E. coli host. Martinez, A., Bradley, A. S., Waldbauer, J. R., Summons, R. E. & Delong, E. F. Proteorhodopsin photosystem gene expression enables photophosphorylation in a heterologous host. PNAS 104, 5590-5595 (2007), which is incorporated by reference in its entirety for all purposes. A total of 46,000 fosmids arrayed in 384-well plates were grown in the presence of HKL-F1 overnight prior to the addition of the biosensor. These metagenomics libraries were functionalized by the addition of the PemrR-GFP biosensor (a reporter strain) which was transferred to the pCC1FOS vector used in library production to facilitate co-culture based screening using shared antibiotic selection. A metagenomics analysis of hydrocarbon resource environments indicates aerobic taxa and genes to be unexpectedly common. D. et al. Environ. Sci. Technol. DOI: 10.1021/es4020184 (2013), which is incorporated by reference in its entirety for all purposes.

[0102] Co-cultures were subsequently grown for three hours prior to measuring GFP fluorescence. Fluorescent signals were normalized to background and corrected for edge effects. Consequently, 24 fosmids activating the emrR biosensor (16 from CO182 and 8 from CO183) were selected for downstream functional characterization and sequencing.

### Example 2

### Lignin Transformation Testing of Fosmids

[0103] To verify the production of lignin transformation products by fosmids activating the PemrR-GFP biosensor, 11 of the most active clones were incubated in the presence of HKL-F1 and a second industrially purified high-performance lignin (HP-L™) substrate. Arato, C., Pye, E. K. and Gjennestad, G. The lignol approach to biorefining of woody biomass to produce ethanol and chemicals, Appl Biochem Biotech. 123, 871-882 (2005), which is incorporated by reference in its entirety for all purposes. Lignin transformation products including acetovanillone, 5-allyl-methoxybenzene-1,2-diol, benzenepropanoic acid, benzene-1,3,5-triol, coniferyl aldehyde, 3,5-dimethyl-4-hydroxycinnamic acid, 2,6-dimethoxybenzene, 2,4-hydroxybenzoic acid, 4-hydroxy-3-methoxy acetophenone, 2-hydroxy-5-methoxy acetophenone, 4-hydroxy-3-methoxybenzoic acid, 3-hydroxy-4-methoxybenzyl alcohol, isovanillic alcohol, 2-methoxy-5-hydroacetophenone, phthalic acid, resveratrol, syringaldehyde, syringaldehyde, syringic acid-d, syringic acid, vanillin, vanillic acid, vanillyl alcohol, vanillylmandelic acid, and 3-vanilpropanol were then measured by gas chromatography-mass spectrometry (GC-MS). An array of monoaromatic compound profiles were observed for single fosmid incubations, which varied between HKL-F1 and HP-L™ as consistent with different substrate properties or varying specificities of fosmid encoded enzymes (FIGS. 1 and 2). Fosmid co-cultures exhibited synergy in combination, producing monoaromatic compound profiles that differed from individual fosmid incubation profiles in unexpected ways (FIGS. 1 and 2). Moreover, while single fosmid incubations with HKL-F1 led to precipitate formation, only co-culture fosmid incubations were capable of forming precipitates with HP-L™.

[0104] The observations confirm that fosmids recovered in the PemrR-GFP biosensor screen confer lignin transformation phenotypes with different end product profiles.

### Example 3

### Gene Analysis

[0105] Random transposon mutagenesis identified genes encoded on the 11 characterized fosmids necessary for activating the PemrR-GFP biosensor. Nine out of 11 fosmids contained transposon insertions capable of reducing biosensor activation in two or more genes, suggesting that the observed lignin transforming phenotypes require multiple pathway components.

[0106] Consistent with this observation, mapping the location of each transposon insertion identified six functional classes implicated in lignin transformation. These included genes predicted to encode electron transfer (unassigned oxidoreductase activity), co-factor generation (hydrogen peroxide formation), protein secretion (secretion apparatus or signal peptide), small molecule transport (multidrug efflux superfamily), motility (methyl accepting chemotaxis proteins (MCP)), and signal transduction (PAS domain containing sensors) pathway components. Full-fosmid sequencing and comparative analysis of all 24 fosmids activating the PemrR-GFP biosensor also identified recurring subsets of genes on typically non-syntenic clones encoding one or more of the six functional classes identified by transposon mutagenesis.

[0107] While electron transfer, co-factor generation and protein secretion have well-defined roles in lignin transformation, the roles of the remaining three functional groups are novel. It is notable that several of the fosmids identified with the PemrR-GFP biosensor actually encode small molecular transport systems similar to emrR and emrB, further reinforcing a role for these genes in regulating microbial responses to monoaromatic exposure in the environment (see TABLES 4 and 5). Cell motility could play a role in establishing optimal cell positioning along transformational gradients.

TABLE 4
SF-HKL

[chemical structure]

TABLE 5
HP-L

[chemical structure]

[0108] This relationship between lignin transformation and cell motility is highlighted by a recent study that observed an enrichment of motility related genes and transcripts in wood feeding termites relative to dung-feeding termites. He, S. et al. Comparative metagenomic and metatransciptomic analysis of hindgut paunch microbiota in wood and dung feeding higher termites. He et al., PLoS ONE. 8(4): e61126 (2013), which is incorporated by reference in its entirety for all purposes.

[0109] Finally, signal transducers could play a role in mediating lignin substrate specificity among and between microbial groups and contribute to gradient formation. The necessity of genes encoding both MCP and signal transduction on the fosmids identified in this study directly implicates both of these functional classes in mediating lignin transformation phenotypes in the environment.

[0110] In addition to the six functional classes described above, 16 of the 24 fully sequenced fosmids harbored mobile genetic elements (MGE). These elements were typically located proximal to one or more of the six functional classes suggesting a role for metabolic island or islet formation in propagating lignin transformation phenotypes in the environment. To further explore the relationship between lignin transformation phenotypes and genomic island or islet formation coverage depth, G+C content variation and tRNA positioning on the active fosmids was examined. Fragment recruitment of 500 million unassembled Illumina reads sourced from CO182 and CO183 environmental DNA identified abrupt changes in coverage depth in genomic intervals harboring MGE and one or more of the six functional classes consistent with island formation. The presence of islands was further supportedin 8 of the fosmids where coverage changes were associated with variation in median G+C composition or tRNA gene positioning. Tables 1 and 3 list exemplary nucleic acids identified and isolated with positive fosmids.

[0111] Two transposon mutants (i.e. position 4949 and position 55060) of fosmid 182_08_C21 (Annotation No. KJ802937) show a reduction in lignin utilization as demonstrated by a reduction in intermediates formed during lignin utilization. These mutants correspond to SEQ ID NOS: 1 and 13, which are both members of the oxidoreductase gene group.

[0112] FIG. 3 provides a graphical representation of the relative proportions of genes grouped into the six functional classes, implicated in lignin utilization phenotypes (out of 813 total genes) in the active fosmids identified in the exemplary screen. Example 4. Host Cell Extracts for Lignin Utilization

[0113] Fosmid ID nos. 182_35_O20 (Annotation No. KJ802947), 182_16_J11 (Ann. No. KJ802944), 182_11_B22 (Ann. No. KJ802940), 182_09_J11 (Ann. No. KJ802938), 182_42_K21 (Ann. No. KJ802948), 182_02_CO3 (Ann. No. KJ802934), or 182_16_E12 (Ann. No. KJ802943) were placed in E. coli. Extracts were prepared from these E. coli by chemical means that include detergents such as SDS. The extracts were subsequently added to a 10 Da filter apparatus for concentration and buffer exchange.

[0114] The extracts were used with a biomass obtained from poplar. Steam treated poplar was mixed with extracts to give 10 mg of soluble protein (from the extract) per gram of biomass. The hydrolysis reaction was performed at 50° C. for 48 hrs and the reaction conditions comprised 50 mM Na-acetate (pH5), 1 mM MnSO4, and 5% (w/w) substrate. The E. coli extracts from fosmids 182_35_020 (Annotation No. KJ802947), 182_16_J11 (Ann. No. KJ802944), 182_11_B22 (Ann. No. KJ802940), 182_09_J11 (Ann. No. KJ802938), 182_42_K21 (Ann. No. KJ802948), 182_02_CO3 (Ann. No. KJ802934), or 182_16_E12 (Ann. No. KJ802943) showed increased utilization of the biomass.

### Example 5

### Extracts from E. coli Containing SEQ ID NO 75

[0115] A vector suitable for use in E. coli is engineered to contain SEQ ID NO. 75, nucleotides 169-6997 from fosmid 182_35_O20. The vector with SEQ ID NO 75 is placed into E. coli using standard techniques. E. coli with the vector is grown overnight in LB, the E. coli cells are recovered, and then exposed to a media containing lignin. The E. coli cells are incubated in the lignin media for 16 hours, and then the cells are isolated. Isolated cells are disrupted by standard methods, and extracts are prepared from the cells.

[0116] The extract obtained from the E. coli cells are added to a biomass material containing lignin. The polypeptides in the extract utilize the lignin in the biomass. Optionally, other polypeptides are added to the biomass for digesting the cellulose in the biomass. Including the E. coli extracts increases the utilization of cellulose in the biomass.

[0117] Although various embodiments of the invention are disclosed herein, many adaptations and modifications may be made within the scope of the invention in accordance with the common general knowledge of those skilled in this art. Such modifications include the substitution of known equivalents for any aspect of the invention in order to achieve the same result in substantially the same way. Numeric ranges are inclusive of the numbers defining the range. The word “comprising” is used herein as an open-ended term, substantially equivalent to the phrase “including, but not limited to”, and the word “comprises” has a corresponding meaning. As used herein, the singular forms “a”, “an” and “the” include plural referents unless the context clearly dictates otherwise. Thus, for example, reference to “a thing” includes more than one such thing. Citation of references herein is not an admission that such references are prior art to an embodiment of the present invention. Any priority document(s) and all publications, including but not limited to patents and patent applications, cited in this specification are incorporated herein by reference as if each individual publication were specifically and individually indicated to be incorporated by reference herein and as though fully set forth herein. The invention includes all embodiments and variations substantially as hereinbefore described and with reference to the examples and drawings.

TABLE 2

| | Is- | | | | |
|---|---|---|---|---|---|
| | land | | | | |
| | num- | | Island | Island | |
| Fosmid ID | ber | Accession | start | stop | SEQ ID No |
| 182_2_C03 | 1 | KJ802934 | 1 | 43497 | SEQ ID NO: 77 |
| 182_6_L14 | 1 | KJ802935 | 9671 | 27599 | SEQ ID NO: 78 |
| 182_8_C21 | 1 | KJ802937 | 1118 | 17713 | SEQ ID NO: 79 |
| 182_9_J11 | 1 | KJ802938 | 151 | 22544 | SEQ ID NO: 80 |
| 182_10_L09 | 1 | KJ802939 | 18834 | 30312 | SEQ ID NO: 81 |
| 182_11_B22 | 1 | KJ802940 | 6517 | 31166 | SEQ ID NO: 82 |
| 182_13_F13 | 1 | KJ802942 | 2486 | 21209 | SEQ ID NO: 83 |
| 182_16_E12 | 1 | KJ802943 | 2 | 25718 | SEQ ID NO: 84 |
| 182_16_J11 | 1 | KJ802944 | 182 | 3249 | SEQ ID NO: 85 |
| 182_16_J11 | 2 | KJ802944 | 3749 | 28341 | SEQ ID NO: 86 |
| 182_17_9 | 1 | KJ802945 | 3 | 19794 | SEQ ID NO: 87 |
| 182_19_A11 | 1 | KJ802946 | 4756 | 32797 | SEQ ID NO: 88 |
| 182_35_20 | 1 | KJ802947 | 169 | 6997 | SEQ ID NO: 89 |
| 182_42_K21 | 1 | KJ802948 | 2 | 39464 | SEQ ID NO: 90 |
| 183_1_D18 | 1 | KJ802949 | 27956 | 34694 | SEQ ID NO: 91 |
| 183_1_D18 | 2 | KJ802949 | 1 | 27576 | SEQ ID NO: 92 |
| 183_21_D14 | 1 | KJ802951 | 2 | 35892 | SEQ ID NO: 93 |
| 183_24_C18 | 1 | KJ802952 | 2 | 12903 | SEQ ID NO: 94 |
| 183_29_M04 | 1 | KJ802954 | 9978 | 34744 | SEQ ID NO: 95 |
| 183_52_O2 | 1 | KJ802957 | 1 | 5196 | SEQ ID NO: 96 |

TABLE 3

| Fosmid/Gene | | Island | ORF | ORF | |
|---|---|---|---|---|---|
| ID | Accession | No. | start | stop | Description |
| 182_09_J11_1 | KJ802938 | 1 | 151 | 1440 | putative aminopeptidase 2 |
| 182_09_J11_2 | KJ802938 | 1 | 1513 | 2475 | NAD(P)(H)-dependent |
| | | | | | oxidoreductase |
| 182_09_J11_3 | KJ802938 | 1 | 2649 | 4733 | prc gene product |
| 182_09_J11_4 | KJ802938 | 1 | 4905 | 5372 | TPR repeat, SEL1 subfamily |
| | | | | | protein |
| 182_09_J11_5 | KJ802938 | 1 | 5372 | 5743 | hypothetical protein |
| | | | | | PSTAB_1345 |
| 182_09_J11_6 | KJ802938 | 1 | 5740 | 6066 | Cro/Cl family transcriptional |
| | | | | | regulator |
| 182_09_J11_7 | KJ802938 | 1 | 6223 | 6699 | hypothetical protein |
| | | | | | A458_07510 |
| 182_09_J11_8 | KJ802938 | 1 | 7028 | 7342 | helix-hairpin-helix repeat- |
| | | | | | containing compet |
| 182_09_J11_9 | KJ802938 | 1 | 7463 | 8731 | flagellar hook-associated |
| | | | | | protein FlgL |
| 182_09_J11_10 | KJ802938 | 1 | 8744 | 10759 | flagellar hook-associated |
| | | | | | protein FlgK |
| 182_09_J11_11 | KJ802938 | 1 | 10763 | 11935 | flagellar rod assembly |
| | | | | | protein/muramidase Fl |
| 182_09_J11_12 | KJ802938 | 1 | 11946 | 13046 | flagellar basal body P-ring |
| | | | | | protein |
| 182_09_J11_13 | KJ802938 | 1 | 13061 | 13756 | flagellar basal body L-ring |
| | | | | | protein |
| 182_09_J11_14 | KJ802938 | 1 | 13841 | 14626 | flagellar basal body rod |
| | | | | | protein FlgG |
| 182_09_J11_15 | KJ802938 | 1 | 14662 | 15402 | flagellar basal body rod |
| | | | | | protein FlgF |
| 182_09_J11_16 | KJ802938 | 1 | 15598 | 17184 | flagellar hook protein FlgE |
| 182_09_J11_17 | KJ802938 | 1 | 17214 | 17897 | flagellar basal body rod |
| | | | | | modification protein |
| 182_09_J11_18 | KJ802938 | 1 | 17917 | 18360 | flagellar basal body rod |
| | | | | | protein FlgC |
| 182_09_J11_19 | KJ802938 | 1 | 18372 | 18836 | flagellar basal body rod |
| | | | | | protein FlgB |
| 182_09_J11_20 | KJ802938 | 1 | 18972 | 19796 | chemotaxis protein |
| | | | | | methyltransferase CheR |
| 182_09_J11_21 | KJ802938 | 1 | 19831 | 20763 | chemotaxis protein CheV |
| 182_09_J11_22 | KJ802938 | 1 | 20855 | 21595 | flagellar basal body P-ring |
| | | | | | biosynthesis protein |
| 182_09_J11_23 | KJ802938 | 1 | 21709 | 22038 | negative regulator of flagellin |
| | | | | | synthesis Fl |
| 182_09_J11_24 | KJ802938 | 1 | 22074 | 22544 | FlgN family protein |
| 182_09_J11_25 | KJ802938 | | 22604 | 23350 | type IV pilus assembly PilZ |
| 182_09_J11_26 | KJ802938 | | 23619 | 24830 | phage integrase family site |
| | | | | | specific recombinase |
| 182_09_J11_27 | KJ802938 | | 24827 | 25399 | hypothetical protein |
| | | | | | PMI32_04729 |
| 182_09_J11_28 | KJ802938 | | 25528 | 25728 | excisionase |
| 182_09_J11_30 | KJ802938 | | 25862 | 26206 | hypothetical protein |
| | | | | | G1E_09582 |
| 182_09_J11_31 | KJ802938 | | 26260 | 26727 | virulence-associated protein E |
| 182_09_J11_35 | KJ802938 | | 27828 | 28385 | hypothetical protein |
| | | | | | PfraA_21814 |
| 182_09_J11_36 | KJ802938 | | 29037 | 29210 | hypothetical protein |
| | | | | | PMI22_00482 |
| 182_09_J11_37 | KJ802938 | | 29207 | 29479 | hypothetical protein |
| | | | | | PMI22_00494 |
| 182_09_J11_41 | KJ802938 | | 30075 | 32627 | hypothetical protein |
| 182_09_J11_45 | KJ802938 | | 34092 | 34493 | possible bacteriophage |
| | | | | | terminase small subunit |
| 182_09_J11_46 | KJ802938 | | 35126 | 35752 | resolvase |
| 182_02_C03_1 | KJ802934 | 1 | 1 | 1266 | acyl-CoA dehydrogenase |
| 182_02_C03_2 | KJ802934 | 1 | 1681 | 2328 | peptide methionine sulfoxide |
| | | | | | reductase |
| 182_02_C03_3 | KJ802934 | 1 | 2440 | 5112 | sensory box protein PAS/PAC |
| | | | | | and GAF sensor-containing |
| 182_02_C03_4 | KJ802934 | 1 | 5223 | 5750 | TPR repeat-containing protein |
| 182_02_C03_5 | KJ802934 | 1 | 5838 | 7844 | pyruvate dehydrogenase |
| | | | | | dihydrolipoyltransace |
| 182_02_C03_6 | KJ802934 | 1 | 7872 | 10517 | 2-oxo-acid dehydrogenase E1 |
| | | | | | subunit |
| 182_02_C03_7 | KJ802934 | 1 | 10784 | 13729 | bifunctional glutamine- |
| | | | | | synthetase adenylyltr |
| 182_02_C03_8 | KJ802934 | 1 | 13780 | 14703 | branched-chain amino acid |
| | | | | | aminotransferase |
| 182_02_C03_9 | KJ802934 | 1 | 14778 | 15812 | lipopolysaccharide |
| | | | | | heptosyltransferase II |
| 182_02_C03_10 | KJ802934 | 1 | 15813 | 16814 | lipopolysaccharide |
| | | | | | heptosyltransferase I |
| 182_02_C03_11 | KJ802934 | 1 | 16814 | 17935 | UDP-glucose:(heptosyl) LPS |
| | | | | | alpha 1,3-glucosy |
| 182_02_C03_12 | KJ802934 | 1 | 17979 | 18785 | lipopolysaccharide core |
| | | | | | heptose(I) kinase RfaP |
| 182_02_C03_13 | KJ802934 | 1 | 18785 | 19519 | lipopolysaccharide kinase |
| 182_02_C03_14 | KJ802934 | 1 | 19516 | 20259 | lipopolysaccharide kinase |
| 182_02_C03_15 | KJ802934 | 1 | 20259 | 21704 | serine/threonine protein |
| | | | | | kinase |
| 182_02_C03_16 | KJ802934 | 1 | 21717 | 23471 | carbamoyltransferase |
| 182_02_C03_17 | KJ802934 | 1 | 23458 | 24375 | glycosyl transferase family |
| | | | | | protein |
| 182_02_C03_18 | KJ802934 | 1 | 24390 | 25619 | hypothetical protein |
| | | | | | A458_02260 |
| 182_02_C03_19 | KJ802934 | 1 | 25874 | 26743 | capsule polysaccharide |
| | | | | | biosynthesis |
| 182_02_C03_20 | KJ802934 | 1 | 26740 | 28497 | O-antigen polymerase protein |
| 182_02_C03_21 | KJ802934 | 1 | 28520 | 29122 | toluene tolerance protein |
| 182_02_C03_22 | KJ802934 | 1 | 29158 | 30975 | transport protein MsbA |
| 182_02_C03_23 | KJ802934 | 1 | 30975 | 31871 | Mig-14 family protein |
| 182_02_C03_24 | KJ802934 | 1 | 31875 | 33269 | LmbE family protein |
| 182_02_C03_25 | KJ802934 | 1 | 33347 | 34768 | bifunctional heptose 7- |
| | | | | | phosphate kinase/heptose 1 |
| 182_02_C03_26 | KJ802934 | 1 | 34839 | 35726 | hypothetical protein |
| | | | | | PstZobell_18470 |
| 182_02_C03_27 | KJ802934 | 1 | 35817 | 36626 | aldo/keto reductase family |
| | | | | | oxidoreductase |
| 182_02_C03_28 | KJ802934 | 1 | 36623 | 37798 | oxidoreductase, FAD-binding |
| | | | | | protein |
| 182_02_C03_29 | KJ802934 | 1 | 37859 | 38191 | multidrug efflux SMR |
| | | | | | transporter |
| 182_02_C03_30 | KJ802934 | 1 | 38311 | 39579 | 3-deoxy-D-manno- |
| | | | | | octulosonic-acid transferase |
| 182_02_C03_31 | KJ802934 | 1 | 39753 | 41207 | outer membrane efflux protein |
| | | | | | TolC/Type 1 secretion |
| 182_02_C03_32 | KJ802934 | 1 | 41590 | 43497 | thiamine biosynthesis protein |
| | | | | | ThiC |
| 182_08_C21_1 | KJ802937 | 1 | 1118 | 1465 | site-specific recombinase, |
| | | | | | phage integrase fa |
| 182_08_C21_2 | KJ802937 | 1 | 1684 | 2343 | hypothetical protein |
| | | | | | CLOSCI_03331 |
| 182_08_C21_3 | KJ802937 | 1 | 2693 | 3838 | general secretion pathway |
| | | | | | protein F |
| 182_08_C21_4 | KJ802937 | 1 | 3915 | 5096 | luciferase family |
| | | | | | oxidoreductase |
| 182_08_C21_5 | KJ802937 | 1 | 5112 | 5597 | methyl-accepting chemotaxis |
| | | | | | sensory transduce.. |
| 182_08_C21_6 | KJ802937 | 1 | 5714 | 6478 | response regulator of the |
| | | | | | LytR/AlgR family |
| 182_08_C21_7 | KJ802937 | 1 | 6459 | 7580 | integral membrane sensor |
| | | | | | signal transduction |
| 182_08_C21_8 | KJ802937 | 1 | 7632 | 9089 | argininosuccinate lyase |
| 182_08_C21_9 | KJ802937 | 1 | 9173 | 10225 | catalase |
| 182_08_C21_10 | KJ802937 | 1 | 10420 | 12924 | large extracellular alpha- |
| | | | | | helical protein |
| 182_08_C21_11 | KJ802937 | 1 | 14078 | 14905 | phosphoserine |
| | | | | | aminotransferase |
| 182_08_C21_12 | KJ802937 | 1 | 14898 | 15998 | phosphoserine |
| | | | | | aminotransferase |
| 182_08_C21_13 | KJ802937 | 1 | 15979 | 16482 | hypothetical protein |
| | | | | | YO5_08308 |
| 182_08_C21_14 | KJ802937 | 1 | 16568 | 17713 | pyrroloquinoline quinone |
| | | | | | biosynthesis protei |
| 182_08_C21_15 | KJ802937 | | 17682 | 17978 | pyrroloquinoline quinone |
| | | | | | biosynthesis protei |
| 182_08_C21_16 | KJ802937 | | 18520 | 20040 | aldehyde dehydrogenase |
| 182_08_C21_17 | KJ802937 | | 20285 | 21403 | NADH:flavin oxidoreductase/ |
| | | | | | NADH oxidase |
| 182_08_C21_18 | KJ802937 | | 21700 | 22611 | pyrroloquinoline quinone |
| | | | | | biosynthesis protei |
| 182_08_C21_19 | KJ802937 | | 22697 | 23449 | pyrroloquinoline quinone |
| | | | | | biosynthesis protei |
| 182_08_C21_20 | KJ802937 | | 23543 | 23821 | pyrroloquinoline quinone |
| | | | | | biosynthesis protein Pqq |
| 182_08_C21_21 | KJ802937 | | 23793 | 24947 | pyrroloquinoline quinone |
| | | | | | biosynthesis protei |
| 182_08_C21_22 | KJ802937 | | 24944 | 26857 | prolyl oligopeptidase family |
| | | | | | protein |
| 182_08_C21_23 | KJ802937 | | 26965 | 28128 | iron-containing alcohol |
| | | | | | dehydrogenase |
| 182_08_C21_24 | KJ802937 | | 28112 | 29809 | PAS/PAC sensor hybrid |
| | | | | | histidine kinase |
| 182_08_C21_25 | KJ802937 | | 29861 | 30205 | hypothetical protein |
| | | | | | PstZobell_17449 |
| 182_08_C21_26 | KJ802937 | | 30298 | 31551 | CzcC family heavy metal |
| | | | | | RND efflux outer membrane |
| 182_08_C21_27 | KJ802937 | | 31548 | 33035 | CzcB family heavy metal |
| | | | | | RND efflux membrane fusio |
| 182_08_C21_28 | KJ802937 | | 33032 | 36154 | CzcA family heavy metal |
| | | | | | RND efflux protein |
| 182_08_C21_29 | KJ802937 | | 36268 | 37149 | Co/Zn/Cd efflux system |
| | | | | | protein |
| 182_08_C21_30 | KJ802937 | | 37158 | 37874 | hypothetical protein |
| | | | | | PstZobell_17469 |
| 182_08_C21_31 | KJ802937 | | 38081 | 38725 | DNA-binding response |
| | | | | | regulator GacA |
| 182_08_C21_32 | KJ802937 | | 38725 | 40548 | excinuclease ABC subunit C |
| 182_08_C21_33 | KJ802937 | | 40582 | 41139 | CDP-diacylglycerol--glycerol- |
| | | | | | 3-phosphate 3-p |
| 182_08_C21_34 | KJ802937 | | 41509 | 42912 | Putative integrase |
| 182_08_C21_35 | KJ802937 | | 43055 | 44821 | thiol:disulfide interchange |
| | | | | | protein precursor |
| 182_08_C21_36 | KJ802937 | | 44972 | 45430 | metal-binding protein |
| 182_08_C21_37 | KJ802937 | | 45456 | 45728 | copper-binding protein |
| 182_08_C21_38 | KJ802937 | | 45803 | 48124 | copper-translocating P-type |
| | | | | | ATPase |
| 182_08_C21_39 | KJ802937 | | 48373 | 48675 | hypothetical protein |
| | | | | | PstZobell_02371 |
| 182_08_C21_40 | KJ802937 | | 48742 | 49071 | ferredoxin |
| 182_08_C21_41 | KJ802937 | | 49226 | 50632 | sensor protein CopS |
| 182_08_C21_42 | KJ802937 | | 50629 | 50964 | transcriptional activator CopR |
| 182_08_C21_43 | KJ802937 | | 51048 | 52028 | ISPssy, transposase |
| 182_08_C21_44 | KJ802937 | | 52163 | 52501 | transcriptional activator CopR |
| 182_08_C21_45 | KJ802937 | | 53011 | 53388 | blue (type1) copper domain- |
| | | | | | containing protein |
| 182_08_C21_46 | KJ802937 | | 53574 | 55274 | copper resistance protein A/ |
| | | | | | twin-arginine translocation |
| | | | | | pathway signal |
| 182_11_B22_1 | KJ802940 | | 1 | 972 | lipoprotein |
| 182_11_B22_2 | KJ802940 | | 965 | 1732 | surface lipoprotein |
| 182_11_B22_3 | KJ802940 | | 1825 | 2667 | pirin-like protein |
| 182_11_B22_4 | KJ802940 | | 2713 | 3651 | lipid A biosynthesis lauroyl |
| | | | | | acyltransferase |
| 182_11_B22_5 | KJ802940 | | 3810 | 4535 | septum formation inhibitor |
| 182_11_B22_6 | KJ802940 | | 4631 | 5446 | septum site-determining |
| | | | | | protein MinD |
| 182_11_B22_7 | KJ802940 | | 5443 | 5700 | cell division topological |
| | | | | | specificity factor |
| 182_11_B22_8 | KJ802940 | | 5762 | 6397 | ribosomal large subunit |
| | | | | | pseudouridine synthase A |
| 182_11_B22_9 | KJ802940 | 1 | 6517 | 7806 | putative aminopeptidase 2 |
| 182_11_B22_10 | KJ802940 | 1 | 7879 | 8841 | NAD(P)(H)-dependent |
| | | | | | oxidoreductase |
| 182_11_B22_11 | KJ802940 | 1 | 9015 | 11099 | periplasmic tail-specific |
| | | | | | protease |
| 182_11_B22_12 | KJ802940 | 1 | 11271 | 11738 | TPR repeat, SEL1 subfamily |
| | | | | | protein |
| 182_11_B22_13 | KJ802940 | 1 | 11738 | 12106 | hypothetical protein |
| | | | | | PSTAB_1345 |
| 182_11_B22_14 | KJ802940 | 1 | 12103 | 12429 | Cro/Cl family transcriptional |
| | | | | | regulator |
| 182_11_B22_15 | KJ802940 | 1 | 12586 | 13062 | hypothetical protein |
| | | | | | A458_07510 |
| 182_11_B22_16 | KJ802940 | 1 | 13390 | 13704 | helix-hairpin-helix repeat- |
| | | | | | containing compet |
| 182_11_B22_17 | KJ802940 | 1 | 13825 | 15093 | flagellar hook-associated |
| | | | | | protein FlgL |
| 182_11_B22_18 | KJ802940 | 1 | 15106 | 17121 | flagellar hook-associated |
| | | | | | protein FlgK |
| 182_11_B22_19 | KJ802940 | 1 | 17125 | 18297 | flagellar rod assembly |
| | | | | | protein/muramidase Fl |
| 182_11_B22_20 | KJ802940 | 1 | 18308 | 19408 | flagellar basal body P-ring |
| | | | | | protein |
| 182_11_B22_21 | KJ802940 | 1 | 19423 | 20118 | flagellar basal body L-ring |
| | | | | | protein |
| 182_11_B22_22 | KJ802940 | 1 | 20203 | 20988 | flagellar basal body rod |
| | | | | | protein FlgG |
| 182_11_B22_23 | KJ802940 | 1 | 21024 | 21764 | flagellar basal body rod |
| | | | | | protein FlgF |
| 182_11_B22_24 | KJ802940 | 1 | 21960 | 23546 | flagellar hook protein FlgE |
| 182_11_B22_25 | KJ802940 | 1 | 23576 | 24259 | flagellar basal body rod |
| | | | | | modification protei |
| 182_11_B22_26 | KJ802940 | 1 | 24279 | 24722 | flagellar basal body rod |
| | | | | | protein FlgC |
| 182_11_B22_27 | KJ802940 | 1 | 24734 | 25198 | flagellar basal body rod |
| | | | | | protein FlgB |
| 182_11_B22_28 | KJ802940 | 1 | 25334 | 26158 | chemotaxis protein |
| | | | | | methyltransferase CheR |
| 182_11_B22_29 | KJ802940 | 1 | 26193 | 27125 | chemotaxis protein CheV |
| 182_11_B22_30 | KJ802940 | 1 | 27217 | 27957 | flagellar basal body P-ring |
| | | | | | biosynthesis pro |
| 182_11_B22_31 | KJ802940 | 1 | 28071 | 28400 | negative regulator of flagellin |
| | | | | | synthesis Fl |
| 182_11_B22_32 | KJ802940 | 1 | 28436 | 28906 | FlgN family protein |
| 182_11_B22_33 | KJ802940 | 1 | 28966 | 29712 | type IV pilus assembly PilZ |
| 182_11_B22_34 | KJ802940 | 1 | 30179 | 30391 | hypothetical protein |
| | | | | | A458_07350 |
| 182_11_B22_35 | KJ802940 | 1 | 30436 | 30621 | hypothetical protein |
| | | | | | PSTAB_1320 |
| 182_11_B22_36 | KJ802940 | 1 | 30849 | 31166 | alginate biosynthesis |
| | | | | | transcriptional activa |
| 182_11_B22_37 | KJ802940 | | 31468 | 32604 | oxaloacetate decarboxylase |
| | | | | | subunit beta |
| 182_11_B22_38 | KJ802940 | | 32615 | 34393 | pyruvate carboxylase subunit B |
| 182_11_B22_39 | KJ802940 | | 34416 | 34658 | sodium pump decarboxylase, |
| | | | | | gamma subunit |
| 182_11_B22_40 | KJ802940 | | 34799 | 36235 | magnesium transporter |
| 182_11_B22_41 | KJ802940 | | 36572 | 37054 | hypothetical protein |
| | | | | | PST_1375 |
| 182_11_B22_42 | KJ802940 | | 37591 | 37776 | carbon storage regulator |
| 182_11_B22_43 | KJ802940 | | 37957 | 39195 | aspartate kinase |
| 182_11_B22_44 | KJ802940 | | 39275 | 40012 | alanyl-tRNA synthetase |
| 182_13_F13_1 | KJ802942 | | 3 | 2480 | phage integrase family |
| | | | | | protein |
| 182_13_F13_2 | KJ802942 | 1 | 2486 | 3868 | phage integrase family |
| | | | | | protein |
| 182_13_F13_3 | KJ802942 | 1 | 4026 | 4151 | oxygen-independent |
| | | | | | coproporphyrinogen III |
| | | | | | oxidase |
| 182_13_F13_4 | KJ802942 | 1 | 4183 | 4803 | TetR family transcriptional |
| | | | | | regulator |
| 182_13_F13_5 | KJ802942 | 1 | 4879 | 6012 | class V aminotransferase |
| 182_13_F13_6 | KJ802942 | 1 | 6233 | 7627 | aromatic amino acid transport |
| | | | | | protein AroP1 |
| 182_13_F13_7 | KJ802942 | 1 | 7739 | 8524 | hydrolase, TatD family |
| 182_13_F13_8 | KJ802942 | 1 | 8628 | 8984 | type 4 fimbrial biogenesis |
| | | | | | protein PilZ |
| 182_13_F13_9 | KJ802942 | 1 | 9016 | 10002 | DNA polymerase III subunit |
| | | | | | delta′ |
| 182_13_F13_10 | KJ802942 | 1 | 9995 | 10627 | thymidylate kinase |
| 182_13_F13_11 | KJ802942 | 1 | 10624 | 11694 | hypothetical protein |
| | | | | | PST_2618 |
| 182_13_F13_12 | KJ802942 | 1 | 11691 | 12512 | 4-amino-4-deoxychorismate |
| | | | | | lyase |
| 182_13_F13_13 | KJ802942 | 1 | 12509 | 13753 | 3-oxoacyl-(acyl carrier |
| | | | | | protein) synthase II |
| 182_13_F13_14 | KJ802942 | 1 | 13926 | 14162 | acyl carrier protein |
| 182_13_F13_15 | KJ802942 | 1 | 14355 | 15098 | 3-ketoacyl-ACP reductase |
| 182_13_F13_16 | KJ802942 | 1 | 15113 | 16051 | malonyl-CoA- |
| 182_13_F13_17 | KJ802942 | 1 | 16115 | 17185 | plsX gene product |
| 182_13_F13_18 | KJ802942 | 1 | 17189 | 17371 | 50S ribosomal protein L32 |
| 182_13_F13_19 | KJ802942 | 1 | 17384 | 17911 | metal-binding protein |
| 182_13_F13_20 | KJ802942 | 1 | 18015 | 18593 | Maf-like protein |
| 182_13_F13_21 | KJ802942 | 1 | 18604 | 19587 | signal peptide peptidase |
| 182_13_F13_22 | KJ802942 | 1 | 19577 | 20263 | HAD superfamily hydrolase |
| 182_13_F13_23 | KJ802942 | 1 | 20256 | 21209 | ribosomal large subunit |
| | | | | | pseudouridine synthase |
| 182_13_F13_24 | KJ802942 | | 21768 | 24965 | ribonuclease E |
| 182_13_F13_25 | KJ802942 | | 25357 | 26376 | UDP-N- |
| | | | | | acetylenolpyruvoylglucosamine |
| | | | | | reductase |
| 182_13_F13_26 | KJ802942 | | 26373 | 26537 | protein-tyrosine-phosphatase |
| 182_16_E12_1 | KJ802943 | 1 | 2 | 382 | putative secreted protein |
| 182_16_E12_2 | KJ802943 | 1 | 476 | 1171 | hypothetical protein |
| 182_16_E12_3 | KJ802943 | 1 | 1168 | 2310 | methyl-accepting chemotaxis |
| | | | | | protein |
| 182_16_E12_4 | KJ802943 | 1 | 2468 | 3217 | AraC family transcriptional |
| | | | | | regulator |
| 182_16_E12_5 | KJ802943 | 1 | 3254 | 4891 | methyl-accepting chemotaxis |
| | | | | | sensory transduc |
| 182_16_E12_6 | KJ802943 | 1 | 5214 | 8381 | putA gene product |
| 182_16_E12_7 | KJ802943 | 1 | 8682 | 10169 | hypothetical protein |
| | | | | | BN5_00960 |
| 182_16_E12_8 | KJ802943 | 1 | 10278 | 11519 | NADH:flavin oxidoreductase |
| 182_16_E12_9 | KJ802943 | 1 | 11752 | 12867 | response regulator |
| 182_16_E12_10 | KJ802943 | 1 | 12901 | 16056 | Multidrug resistance protein |
| 182_16_E12_11 | KJ802943 | 1 | 16058 | 17143 | RND family efflux transporter |
| | | | | | MFP subunit |
| 182_16_E12_12 | KJ802943 | 1 | 17146 | 17805 | HTH-type transcriptional |
| | | | | | regulator betl |
| 182_16_E12_13 | KJ802943 | 1 | 18244 | 19002 | conserved hypothethical |
| | | | | | protein, SAM-dependent m |
| 182_16_E12_14 | KJ802943 | 1 | 19089 | 20378 | FAD-dependent |
| | | | | | oxidoreductase |
| 182_16_E12_15 | KJ802943 | 1 | 20418 | 20975 | XRE family transcriptional |
| | | | | | regulator |
| 182_16_E12_16 | KJ802943 | 1 | 21009 | 22361 | glutamine synthetase |
| 182_16_E12_17 | KJ802943 | 1 | 22412 | 22789 | MerR family transcriptional |
| | | | | | regulator |
| 182_16_E12_18 | KJ802943 | 1 | 22844 | 23422 | NADPH-dependent reductase |
| 182_16_E12_19 | KJ802943 | 1 | 23588 | 24127 | hypothetical protein |
| | | | | | PST_2845 |
| 182_16_E12_20 | KJ802943 | 1 | 24085 | 24297 | hypothetical protein |
| 182_16_E12_21 | KJ802943 | 1 | 24435 | 25718 | glycine/D-amino acid oxidase |
| 182_16_E12_22 | KJ802943 | | 26204 | 28126 | threonyl-tRNA synthetase |
| 182_16_E12_23 | KJ802943 | | 28144 | 28677 | translation initiation factor IF-3 |
| 182_16_E12_24 | KJ802943 | | 28738 | 28932 | 50S ribosomal protein L35 |
| 182_16_E12_25 | KJ802943 | | 28961 | 29317 | rplT gene product |
| 182_16_E12_26 | KJ802943 | | 29412 | 30428 | pheS gene product |
| 182_16_E12_27 | KJ802943 | | 30471 | 32273 | phenylalanyl-tRNA |
| | | | | | synthetase subunit beta |
| 182_16_J11_1 | KJ802944 | 1 | 182 | 361 | Alcohol dehydrogenase |
| | | | | | GroES domain protein |
| 182_16_J11_2 | KJ802944 | 1 | 409 | 1773 | aromatic hydrocarbon |
| | | | | | degradation outer membrane |
| | | | | | protein |
| 182_16_J11_3 | KJ802944 | 1 | 1897 | 3249 | methyl-accepting chemotaxis |
| | | | | | transducer/PAS protein |
| 182_16_J11_4 | KJ802944 | 2 | 3749 | 4765 | Glycosyl hydrolase, BNR |
| | | | | | repeat |
| 182_16_J11_5 | KJ802944 | 2 | 4776 | 7232 | RND superfamily exporter |
| 182_16_J11_6 | KJ802944 | 2 | 7277 | 9166 | cox2 cytochrome oxidase |
| | | | | | subunit |
| 182_16_J11_7 | KJ802944 | 2 | 9185 | 10489 | hypothetical protein |
| 182_16_J11_8 | KJ802944 | 2 | 10588 | 12135 | methyl-accepting chemotaxis |
| | | | | | protein, PAS domain S-box |
| 182_16_J11_9 | KJ802944 | 2 | 12240 | 13907 | malonate decarboxylase, |
| | | | | | alpha subunit |
| 182_16_J11_10 | KJ802944 | 2 | 13907 | 14782 | triphosphoribosyl-dephospho- |
| | | | | | CoA synthase |
| 182_16_J11_11 | KJ802944 | 2 | 14785 | 15084 | malonate decarboxylase |
| | | | | | subunit delta |
| 182_16_J11_12 | KJ802944 | 2 | 15077 | 15943 | mdcD gene product |
| 182_16_J11_13 | KJ802944 | 2 | 15940 | 16725 | malonate decarboxylase, |
| | | | | | gamma subunit |
| 182_16_J11_14 | KJ802944 | 2 | 16798 | 17415 | phosphoribosyl-dephospho- |
| | | | | | CoA transferase |
| 182_16_J11_15 | KJ802944 | 2 | 17412 | 18338 | malonyl CoA-acyl carrier |
| | | | | | protein transacylas |
| 182_16_J11_16 | KJ802944 | 2 | 18463 | 18885 | malonate transporter, MadL |
| | | | | | subunit |
| 182_16_J11_17 | KJ802944 | 2 | 18891 | 19655 | malonate transporter subunit |
| | | | | | MadM |
| 182_16_J11_18 | KJ802944 | 2 | 20092 | 21351 | FAD-dependent |
| | | | | | oxidoreductase |
| 182_16_J11_19 | KJ802944 | 2 | 21665 | 22582 | LysR family transcriptional |
| | | | | | regulator |
| 182_16_J11_20 | KJ802944 | 2 | 22641 | 23282 | hypothetical protein |
| | | | | | A458_00600 |
| 182_16_J11_21 | KJ802944 | 2 | 23297 | 23848 | RNA polymerase sigma factor |
| 182_16_J11_22 | KJ802944 | 2 | 24041 | 24313 | hypothetical protein |
| | | | | | A458_00610 |
| 182_16_J11_23 | KJ802944 | 2 | 24330 | 25157 | hypothetical protein |
| | | | | | PstZobell_06533 |
| 182_16_J11_24 | KJ802944 | 2 | 25154 | 25930 | hypothetical protein |
| | | | | | PstZobell_06538 |
| 182_16_J11_25 | KJ802944 | 2 | 25942 | 26433 | DoxX family protein |
| 182_16_J11_26 | KJ802944 | 2 | 26455 | 26661 | hypothetical protein |
| | | | | | A458_00630 |
| 182_16_J11_27 | KJ802944 | 2 | 26827 | 28341 | lipase, class 3 |
| 182_16_J11_28 | KJ802944 | | 28975 | 29718 | lipoprotein |
| 182_16_J11_29 | KJ802944 | | 29723 | 30568 | hypothetical protein |
| | | | | | A458_00645 |
| 182_16_J11_30 | KJ802944 | | 30565 | 32076 | Rhs element Vgr protein, type |
| | | | | | VI secretion system Vgr family |
| | | | | | protein |
| 182_17_09_1 | KJ802945 | 1 | 3 | 1040 | choline transport protein BetT |
| 182_17_09_2 | KJ802945 | 1 | 1127 | 2599 | glycine betaine aldehyde |
| | | | | | dehydrogenase |
| 182_17_09_3 | KJ802945 | 1 | 2614 | 4287 | choline dehydrogenase |
| 182_17_09_4 | KJ802945 | 1 | 4389 | 5711 | ribosomal protein S12 |
| | | | | | methylthiotransferase |
| 182_17_09_5 | KJ802945 | 1 | 5872 | 6744 | YesN family response |
| | | | | | regulator |
| 182_17_09_6 | KJ802945 | 1 | 7093 | 7284 | Flp pilus assembly protein, |
| | | | | | pilin Flp |
| 182_17_09_7 | KJ802945 | 1 | 7291 | 7812 | Flp pilus assembly protein, |
| | | | | | protease CpaA |
| 182_17_09_8 | KJ802945 | 1 | 7825 | 9147 | hypothetical protein |
| | | | | | PMI26_01591 |
| 182_17_09_9 | KJ802945 | 1 | 9160 | 9969 | Flp pilus assembly protein, |
| | | | | | RcpC family |
| 182_17_09_10 | KJ802945 | 1 | 10024 | 11538 | type II and III secretion |
| | | | | | system protein |
| 182_17_09_11 | KJ802945 | 1 | 11554 | 11823 | hypothetical protein |
| | | | | | YO5_15635 |
| 182_17_09_12 | KJ802945 | 1 | 11834 | 13168 | Flp pilus assembly protein |
| | | | | | TadG |
| 182_17_09_13 | KJ802945 | 1 | 13180 | 13650 | Flp pilus assembly protein |
| | | | | | TadG |
| 182_17_09_14 | KJ802945 | 1 | 13650 | 14153 | Flp pilus assembly protein |
| | | | | | TadG |
| 182_17_09_15 | KJ802945 | 1 | 14147 | 15376 | type II/IV secretion system |
| | | | | | ATPase TadZ |
| 182_17_09_16 | KJ802945 | 1 | 15366 | 16787 | type II/IV secretion system |
| | | | | | protein |
| 182_17_09_17 | KJ802945 | 1 | 16784 | 17770 | type II secretion system |
| | | | | | protein F |
| 182_17_09_18 | KJ802945 | 1 | 17781 | 18749 | type II secretion system |
| | | | | | protein; membrane p |
| 182_17_09_19 | KJ802945 | 1 | 18751 | 19794 | TPR repeat protein |
| 182_17_09_20 | KJ802945 | | 19807 | 20877 | O-antigen acetylase |
| 182_17_09_21 | KJ802945 | | 20900 | 21973 | glycosyl transferase family |
| | | | | | protein |
| 182_17_09_22 | KJ802945 | | 21985 | 22179 | hypothetical protein |
| | | | | | PSTAB_1644 |
| 182_17_09_23 | KJ802945 | | 22219 | 22557 | hypothetical protein |
| | | | | | PSTAB_1645 |
| 182_17_09_24 | KJ802945 | | 22605 | 23807 | glycoside hydrolase family |
| | | | | | protein |
| 182_17_09_25 | KJ802945 | | 23864 | 24910 | hypothetical protein |
| | | | | | PST_1752 |
| 182_17_09_26 | KJ802945 | | 24965 | 26071 | glycoside hydrolase family |
| | | | | | protein |
| 182_17_09_27 | KJ802945 | | 26277 | 27590 | hypothetical protein |
| | | | | | PstZobell_19633 |
| 182_17_09_28 | KJ802945 | | 27616 | 28866 | hypothetical protein |
| | | | | | PST_1755 |
| 182_17_09_29 | KJ802945 | | 28808 | 30172 | glycosyl transferase, group 1 |
| | | | | | family protein |
| 182_17_09_30 | KJ802945 | | 30180 | 30689 | transcriptional activator RfaH |
| 182_17_09_31 | KJ802945 | | 30744 | 31487 | hypothetical protein |
| 182_17_09_32 | KJ802945 | | 31510 | 33723 | tyrosine-protein kinase |
| 182_17_09_33 | KJ802945 | | 33773 | 34705 | glycosyl transferase family |
| | | | | | protein |
| 182_17_09_34 | KJ802945 | | 34674 | 35285 | polysaccharide biosynthesis |
| | | | | | protein |
| 182_35_020_1 | KJ802947 | | 1 | 165 | type 4 prepilin peptidase PilD |
| 182_35_020_2 | KJ802947 | 1 | 169 | 1389 | type II secretory pathway, |
| | | | | | component |
| 182_35_020_3 | KJ802947 | 1 | 1392 | 3095 | type IV-A pilus assembly |
| | | | | | ATPase PilB |
| 182_35_020_4 | KJ802947 | 1 | 3460 | 3645 | Tfp structural protein |
| 182_35_020_6 | KJ802947 | 1 | 4854 | 5261 | hypothetical protein |
| 182_35_020_7 | KJ802947 | 1 | 5262 | 6104 | hypothetical protein |
| 182_35_020_8 | KJ802947 | 1 | 6101 | 6997 | putative ABC transporter |
| | | | | | ATP-binding protein |
| 182_35_020_9 | KJ802947 | | 7083 | 8621 | bifunctional sulfate |
| | | | | | adenylyltransferase subunit |
| 182_35_020_10 | KJ802947 | | 8992 | 9909 | sulfate adenylyltransferase |
| | | | | | subunit 2 |
| 182_35_020_11 | KJ802947 | | 10095 | 10853 | dinuclear metal center |
| | | | | | protein, putative hydrolase- |
| | | | | | oxidas |
| 182_35_020_12 | KJ802947 | | 11014 | 12171 | 2-alkenal reductase |
| 182_35_020_13 | KJ802947 | | 12267 | 13313 | histidinol-phosphate |
| | | | | | aminotransferase |
| 182_35_020_14 | KJ802947 | | 13410 | 14720 | bifunctional histidinal |
| | | | | | dehydrogenase/histi |
| 182_35_020_15 | KJ802947 | | 14890 | 15522 | ATP |
| | | | | | phosphoribosyltransferase |
| | | | | | catalytic subu |
| 182_35_020_16 | KJ802947 | | 15758 | 17023 | UDP-N-acetylglucosamine 1- |
| | | | | | carboxyvinyltransferase |
| 182_35_020_17 | KJ802947 | | 17127 | 17366 | toluene-tolerance protein |
| 182_35_020_18 | KJ802947 | | 17466 | 17957 | hypothetical protein |
| | | | | | PST_1042 |
| 182_35_020_19 | KJ802947 | | 17971 | 18285 | toluene-tolerance protein |
| 182_35_020_20 | KJ802947 | | 18278 | 18925 | toluene-tolerance protein |
| 182_35_020_21 | KJ802947 | | 18937 | 19395 | toluene tolerance ABC |
| | | | | | transporter periplasmi |
| 182_35_020_22 | KJ802947 | | 19395 | 20192 | toluene tolerance ABC efflux |
| | | | | | transporter, pe |
| 182_35_020_23 | KJ802947 | | 20185 | 21000 | toluene tolerance ABC efflux |
| | | | | | transporter, AT |
| 182_35_020_24 | KJ802947 | | 21282 | 22256 | hypothetical protein |
| | | | | | A458_16580 |
| 182_35_020_25 | KJ802947 | | 22256 | 22780 | Yrbl family phosphatase |
| 182_35_020_26 | KJ802947 | | 22789 | 23361 | hypothetical protein |
| | | | | | A458_16590 |
| 182_35_020_27 | KJ802947 | | 23348 | 23893 | OstA family protein |
| 182_35_020_28 | KJ802947 | | 23893 | 24618 | hypothetical protein |
| 182_35_020_29 | KJ802947 | | 24764 | 26272 | sigma factor sigma-54 |
| 182_35_020_30 | KJ802947 | | 26347 | 26655 | Sigma54 modulation protein |
| 182_35_020_31 | KJ802947 | | 26663 | 27127 | phosphotransferase enzyme |
| | | | | | IIA |
| 182_35_020_32 | KJ802947 | | 27143 | 28000 | glmZ(sRNA)-inactivating |
| | | | | | NTPase |
| 182_35_020_33 | KJ802947 | | 28015 | 28287 | phosphotransferase system, |
| | | | | | phosphocarrier pr |
| 182_35_020_34 | KJ802947 | | 28340 | 29686 | PmbA protein |
| 182_35_020_35 | KJ802947 | | 29799 | 30320 | hypothetical protein |
| | | | | | A458_16635 |
| 182_35_020_36 | KJ802947 | | 30396 | 31838 | peptidase U62, modulator of |
| | | | | | DNA gyrase |
| 182_35_020_37 | KJ802947 | | 31841 | 32551 | carbon-nitrogen hydrolase |
| | | | | | family protein |
| 182_42_K21_1 | KJ802948 | 1 | 2 | 1057 | acyl-CoA dehydrogenase |
| | | | | | domain-containing protein |
| 182_42_K21_2 | KJ802948 | 1 | 1472 | 2119 | peptide methionine sulfoxide |
| | | | | | reductase |
| 182_42_K21_3 | KJ802948 | 1 | 2231 | 4903 | PAS/PAC and GAF sensor- |
| | | | | | containing |
| 182_42_K21_4 | KJ802948 | 1 | 5014 | 5541 | TPR repeat-containing protein |
| 182_42_K21_5 | KJ802948 | 1 | 5650 | 7656 | dihydrolipoamide |
| | | | | | acetyltransferase |
| 182_42_K21_6 | KJ802948 | 1 | 7681 | 10326 | pyruvate dehydrogenase |
| | | | | | subunit E1 |
| 182_42_K21_7 | KJ802948 | 1 | 10593 | 13538 | glutamate-ammonia-ligase |
| | | | | | adenylyltransferase |
| 182_42_K21_8 | KJ802948 | 1 | 13589 | 14512 | branched-chain amino acid |
| | | | | | aminotransferase |
| 182_42_K21_9 | KJ802948 | 1 | 14591 | 15625 | heptosyltransferase II |
| 182_42_K21_10 | KJ802948 | 1 | 15626 | 16627 | lipopolysaccharide |
| | | | | | heptosyltransferase I |
| 182_42_K21_11 | KJ802948 | 1 | 16627 | 17748 | waaG gene product |
| 182_42_K21_12 | KJ802948 | 1 | 17792 | 18598 | lipopolysaccharide core |
| | | | | | biosynthesis protein |
| 182_42_K21_13 | KJ802948 | 1 | 18598 | 19332 | lipopolysaccharide kinase |
| 182_42_K21_14 | KJ802948 | 1 | 19329 | 20072 | lipopolysaccharide kinase |
| 182_42_K21_15 | KJ802948 | 1 | 20072 | 21517 | serine/threonine protein |
| | | | | | kinase |
| 182_42_K21_16 | KJ802948 | 1 | 21530 | 23284 | carbamoyl transferase |
| 182_42_K21_17 | KJ802948 | 1 | 23271 | 24383 | group 1 glycosyl transferase |
| 182_42_K21_18 | KJ802948 | 1 | 24461 | 25189 | putative acetyltransferase |
| 182_42_K21_19 | KJ802948 | 1 | 25186 | 26145 | hypothetical protein |
| 182_42_K21_20 | KJ802948 | 1 | 26148 | 27020 | hypothetical protein |
| | | | | | PSTAB_3787 |
| 182_42_K21_21 | KJ802948 | 1 | 27024 | 27782 | hypothetical protein |
| | | | | | PSTAB_3786 |
| 182_42_K21_22 | KJ802948 | 1 | 27779 | 28930 | hypothetical protein |
| | | | | | PSTAB_3785 |
| 182_42_K21_23 | KJ802948 | 1 | 28955 | 29572 | Ttg8 |
| 182_42_K21_24 | KJ802948 | 1 | 29687 | 31495 | lipid A ABC exporter, fused |
| | | | | | ATPase and inner |
| 182_42_K21_25 | KJ802948 | 1 | 31495 | 32391 | Mig-14 family protein |
| 182_42_K21_26 | KJ802948 | 1 | 32395 | 33789 | LmbE family protein |
| 182_42_K21_27 | KJ802948 | 1 | 33870 | 35291 | rfaE gene product |
| 182_42_K21_28 | KJ802948 | 1 | 35326 | 36213 | hypothetical protein |
| | | | | | PST_3822 |
| 182_42_K21_29 | KJ802948 | 1 | 36299 | 37108 | putative oxidoreductase, aryl- |
| | | | | | alcohol dehydro |
| 182_42_K21_30 | KJ802948 | 1 | 37105 | 38280 | oxidoreductase, FAD-binding |
| | | | | | protein |
| 182_42_K21_31 | KJ802948 | 1 | 38273 | 38671 | multidrug efflux SMR |
| | | | | | transporter |
| 182_42_K21_32 | KJ802948 | 1 | 38766 | 39464 | 3-deoxy-D-manno- |
| | | | | | octulosonic-acid transferase |
| 183_01_D18_1 | KJ802949 | 2 | 1 | 813 | Alcohol dehydrogenase zinc- |
| | | | | | binding domain |
| 183_01_D18_2 | KJ802949 | 2 | 859 | 2646 | acyl-CoA dehydrogenase |
| 183_01_D18_3 | KJ802949 | 2 | 2673 | 3263 | nitroreductase |
| 183_01_D18_4 | KJ802949 | 2 | 3476 | 4375 | resorcinol hydroxylase small |
| | | | | | subunit |
| 183_01_D18_5 | KJ802949 | 2 | 4438 | 5319 | 6-phosphogluconate |
| | | | | | dehydrogenase NAD-binding |
| 183_01_D18_7 | KJ802949 | 2 | 5769 | 6632 | Enoyl-CoA |
| | | | | | hydratase/isomerase |
| 183_01_D18_8 | KJ802949 | 2 | 6692 | 8170 | aldehyde dehydrogenase |
| 183_01_D18_9 | KJ802949 | 2 | 8195 | 9181 | Dehydrogenase E1 |
| | | | | | component superfamily protei |
| 183_01_D18_10 | KJ802949 | 2 | 9196 | 10179 | Transketolase, C-terminal |
| | | | | | domain protein |
| 183_01_D18_11 | KJ802949 | 2 | 10189 | 11457 | 2-oxo acid dehydrogenases |
| | | | | | acyltransferase (ca |
| 183_01_D18_12 | KJ802949 | 2 | 11466 | 12878 | dihydrolipoyl dehydrogenase |
| 183_01_D18_13 | KJ802949 | 2 | 12892 | 13329 | acyl-CoA hydrolase |
| 183_01_D18_14 | KJ802949 | 2 | 13364 | 15748 | Putative bifunctional protein |
| | | | | | 3-hydroxyacyl-C |
| 183_01_D18_15 | KJ802949 | 2 | 15758 | 16954 | acetyl-CoA acetyltransferase |
| 183_01_D18_16 | KJ802949 | 2 | 16959 | 17375 | thioesterase |
| 183_01_D18_17 | KJ802949 | 2 | 17632 | 18285 | transcriptional regulator, TetR |
| | | | | | family |
| 183_01_D18_18 | KJ802949 | 2 | 18317 | 19375 | hypothetical protein |
| 183_01_D18_19 | KJ802949 | 2 | 19388 | 20749 | Protein of unknown function |
| | | | | | (DUF1329) |
| 183_01_D18_20 | KJ802949 | 2 | 20878 | 21975 | putative photosystem II |
| | | | | | stability/assembly fa |
| 183_01_D18_21 | KJ802949 | 2 | 21975 | 24422 | putative RND superfamily |
| | | | | | exporter |
| 183_01_D18_22 | KJ802949 | 2 | 24441 | 25466 | hypothetical protein |
| | | | | | AZKH_p0596 |
| 183_01_D18_23 | KJ802949 | 2 | 25543 | 26712 | major facilitator transporter |
| 183_01_D18_24 | KJ802949 | 2 | 27088 | 27576 | integrase catalytic region |
| | | | | | protein |
| 183_01_D18_25 | KJ802949 | 1 | 27956 | 28321 | putative type III effector Hop |
| | | | | | protein |
| 183_01_D18_26 | KJ802949 | 1 | 28318 | 28557 | Integrating conjugative |
| | | | | | element protein |
| 183_01_D18_27 | KJ802949 | 1 | 28580 | 28948 | integrating conjugative |
| | | | | | element |
| 183_01_D18_28 | KJ802949 | 1 | 28961 | 29371 | conjugative transfer region |
| | | | | | protein |
| 183_01_D18_29 | KJ802949 | 1 | 29451 | 30143 | integrating conjugative |
| | | | | | element protein |
| 183_01_D18_30 | KJ802949 | 1 | 30140 | 31054 | putative secreted protein |
| 183_01_D18_31 | KJ802949 | 1 | 31044 | 32477 | integrating conjugative |
| | | | | | element protein |
| 183_01_D18_32 | KJ802949 | 1 | 32458 | 32892 | Conjugative transfer region |
| | | | | | lipoprotein |
| 183_01_D18_33 | KJ802949 | 1 | 32892 | 34694 | conjugative transfer ATPase |
| 183_12_O16_1 | KJ802950 | | 2 | 928 | RND efflux transporter |
| | | | | | permease |
| 183_12_O16_2 | KJ802950 | | 943 | 2001 | RND family efflux transporter |
| | | | | | MFP subunit |
| 183_12_O16_3 | KJ802950 | | 2082 | 2468 | cobalamin (vitamin B12) |
| | | | | | biosynthesis CbiX pr |
| 183_12_O16_4 | KJ802950 | | 2548 | 3348 | UBA/THIF-type NAD/FAD- |
| | | | | | binding protein |
| 183_12_O16_5 | KJ802950 | | 3356 | 4318 | Zn-dependent hydrolase |
| 183_12_O16_6 | KJ802950 | | 4506 | 5009 | single-strand binding protein |
| 183_12_O16_7 | KJ802950 | | 5067 | 6338 | major facilitator superfamily |
| | | | | | protein |
| 183_12_O16_8 | KJ802950 | | 6432 | 9317 | excinuclease ABC subunit A |
| 183_12_O16_9 | KJ802950 | | 9278 | 10324 | UDP-glucose 4-epimerase |
| 183_12_O16_10 | KJ802950 | | 10425 | 10823 | 50S ribosomal protein L17 |
| 183_12_O16_11 | KJ802950 | | 10849 | 11829 | DNA-directed RNA |
| | | | | | polymerase subunit alpha |
| 183_12_O16_12 | KJ802950 | | 11869 | 12498 | 30S ribosomal protein S4 |
| 183_12_O16_13 | KJ802950 | | 12513 | 12902 | 30S ribosomal protein S11 |
| 183_12_O16_14 | KJ802950 | | 12915 | 13277 | rpsM gene product |
| 183_12_O16_15 | KJ802950 | | 13331 | 13444 | 50S ribosomal protein L36 |
| 183_12_O16_16 | KJ802950 | | 13470 | 13688 | translation initiation factor IF-1 |
| 183_12_O16_17 | KJ802950 | | 13693 | 15018 | preprotein translocase subunit |
| | | | | | SecY |
| 183_12_O16_18 | KJ802950 | | 15034 | 15471 | 50S ribosomal protein L15 |
| 183_12_O16_19 | KJ802950 | | 15473 | 15655 | 50S ribosomal protein L30 |
| 183_12_O16_20 | KJ802950 | | 15659 | 16183 | 30S ribosomal protein S5 |
| 183_12_O16_21 | KJ802950 | | 16196 | 16549 | 50S ribosomal protein L18 |
| 183_12_O16_22 | KJ802950 | | 16561 | 17094 | rplF gene product |
| 183_12_O16_23 | KJ802950 | | 17105 | 17500 | 30S ribosomal protein S8 |
| 183_12_O16_24 | KJ802950 | | 17514 | 17819 | 30S ribosomal protein S14 |
| 183_12_O16_25 | KJ802950 | | 17827 | 18366 | 50S ribosomal protein L5 |
| 183_12_O16_26 | KJ802950 | | 18376 | 18693 | 50S ribosomal protein L24 |
| 183_12_O16_27 | KJ802950 | | 18705 | 19073 | 50S ribosomal protein L14 |
| 183_12_O16_28 | KJ802950 | | 19227 | 19496 | 30S ribosomal protein S17 |
| 183_12_O16_29 | KJ802950 | | 19493 | 19687 | 50S ribosomal protein L29 |
| 183_12_O16_30 | KJ802950 | | 19690 | 20106 | 50S ribosomal protein L16 |
| 183_12_O16_31 | KJ802950 | | 20106 | 20876 | 30S ribosomal protein S3 |
| 183_12_O16_32 | KJ802950 | | 20886 | 21215 | 50S ribosomal protein L22 |
| 183_12_O16_33 | KJ802950 | | 21230 | 21505 | 30S ribosomal protein S19 |
| 183_12_O16_34 | KJ802950 | | 21516 | 22343 | 50S ribosomal protein L2 |
| 183_12_O16_35 | KJ802950 | | 22350 | 22655 | 50S ribosomal protein L23 |
| 183_12_O16_36 | KJ802950 | | 22652 | 23272 | 50S ribosomal protein L4 |
| 183_12_O16_37 | KJ802950 | | 23283 | 23921 | 50S ribosomal protein L3 |
| 183_12_O16_38 | KJ802950 | | 24034 | 24345 | 30S ribosomal protein S10 |
| 183_12_O16_39 | KJ802950 | | 24432 | 25622 | elongation factor Tu |
| 183_12_O16_40 | KJ802950 | | 25673 | 27772 | elongation factor G |
| 183_12_O16_41 | KJ802950 | | 27880 | 28347 | rpsG gene product |
| 183_12_O16_42 | KJ802950 | | 28381 | 28758 | 30S ribosomal protein S12 |
| 183_12_O16_43 | KJ802950 | | 28893 | 32855 | DNA-directed RNA |
| | | | | | polymerase subunit beta′ |
| 183_21_D14_1 | KJ802951 | 1 | 2 | 862 | HAD-superfamily hydrolase, |
| | | | | | subfamily IA, vari |
| 183_21_D14_2 | KJ802951 | 1 | 908 | 1774 | integral membrane protein |
| 183_21_D14_3 | KJ802951 | 1 | 1771 | 1983 | conserved hypothetical |
| | | | | | protein |
| 183_21_D14_4 | KJ802951 | 1 | 2033 | 2692 | glutathione S-transferase-like |
| | | | | | protein |
| 183_21_D14_5 | KJ802951 | 1 | 2799 | 4214 | RND efflux system outer |
| | | | | | membrane lipoprotein |
| 183_21_D14_6 | KJ802951 | 1 | 4318 | 5673 | RND family efflux transporter |
| | | | | | MFP subunit |
| 183_21_D14_7 | KJ802951 | 1 | 5670 | 6419 | ABC transporter related |
| | | | | | protein |
| 183_21_D14_8 | KJ802951 | 1 | 6419 | 7621 | ABC-type antimicrobial |
| | | | | | peptide transport syst |
| 183_21_D14_9 | KJ802951 | 1 | 7712 | 8917 | response regulator receiver |
| | | | | | modulated diguany PAS |
| 183_21_D14_10 | KJ802951 | 1 | 9126 | 9512 | heat shock protein Hsp20 |
| 183_21_D14_11 | KJ802951 | 1 | 9607 | 10953 | abc-type branched-chain |
| | | | | | amino acid transporte |
| 183_21_D14_12 | KJ802951 | 1 | 11016 | 11927 | alpha/beta hydrolase fold |
| | | | | | protein |
| 183_21_D14_13 | KJ802951 | 1 | 12278 | 13240 | transposase |
| | | | | | IS116/IS110/IS902 family |
| | | | | | protein |
| 183_21_D14_14 | KJ802951 | 1 | 13267 | 14127 | alpha/beta hydrolase family |
| | | | | | protein |
| 183_21_D14_15 | KJ802951 | 1 | 14137 | 15723 | acyltransferase, |
| | | | | | WS/DGAT/MGAT |
| 183_21_D14_16 | KJ802951 | 1 | 15903 | 16730 | PAS/PAC sensor-containing |
| | | | | | diguanylate |
| 183_21_D14_17 | KJ802951 | 1 | 16941 | 18035 | lytic murein transglycosylase B |
| 183_21_D14_18 | KJ802951 | 1 | 18032 | 20077 | transglutaminase-like |
| | | | | | enzyme, predicted cyste |
| 183_21_D14_19 | KJ802951 | 1 | 20160 | 21170 | hypothetical protein |
| | | | | | AradN_05929 |
| 183_21_D14_20 | KJ802951 | 1 | 21191 | 22111 | ATPase |
| 183_21_D14_21 | KJ802951 | 1 | 22154 | 23107 | histone deacetylase |
| | | | | | superfamily protein |
| 183_21_D14_22 | KJ802951 | 1 | 23126 | 23911 | enoyl-CoA |
| | | | | | hydratase/carnithine |
| | | | | | racemase |
| 183_21_D14_23 | KJ802951 | 1 | 23911 | 25233 | mechanosensitive ion |
| | | | | | channel protein MscS |
| 183_21_D14_24 | KJ802951 | 1 | 25488 | 26237 | electron transfer flavoprotein |
| | | | | | subunit alpha |
| 183_21_D14_25 | KJ802951 | 1 | 26390 | 27322 | electron transfer flavoprotein |
| | | | | | subunit alpha |
| 183_21_D14_26 | KJ802951 | 1 | 27499 | 29289 | acyl-CoA dehydrogenase |
| | | | | | domain protein |
| 183_21_D14_27 | KJ802951 | 1 | 29416 | 30372 | 2-nitropropane dioxygenase |
| 183_21_D14_28 | KJ802951 | 1 | 30482 | 32476 | acetate--CoA ligase |
| 183_21_D14_29 | KJ802951 | 1 | 33163 | 33468 | cytochrome c class I |
| 183_21_D14_30 | KJ802951 | 1 | 33570 | 33812 | conserved hypothetical |
| | | | | | protein |
| 183_21_D14_31 | KJ802951 | 1 | 34036 | 35892 | dihydroxy-acid dehydratase |
| 183_21_D14_32 | KJ802951 | | 36115 | 36525 | virulence-associated protein C |
| 183_21_D14_33 | KJ802951 | | 36525 | 36758 | Virulence-associated protein |
| 183_21_D14_34 | KJ802951 | | 36895 | 38076 | type III restriction protein res |
| | | | | | subunit |
| 183_24_C18_1 | KJ802952 | 1 | 2 | 685 | hypothetical protein |
| 183_24_C18_3 | KJ802952 | 1 | 836 | 1678 | hypothetical protein |
| | | | | | PMI14_02990 |
| 183_24_C18_4 | KJ802952 | 1 | 1777 | 2247 | lactoylglutathione lyase |
| 183_24_C18_5 | KJ802952 | 1 | 2432 | 2938 | hypothetical protein |
| | | | | | MEA186_14922 |
| 183_24_C18_6 | KJ802952 | 1 | 3443 | 4534 | biotin synthase |
| 183_24_C18_7 | KJ802952 | 1 | 4568 | 5758 | response regulator receiver |
| | | | | | modulated metal d |
| 183_24_C18_8 | KJ802952 | 1 | 5802 | 8843 | hypothetical protein |
| | | | | | AradN_03058 |
| 183_24_C18_9 | KJ802952 | 1 | 8862 | 9398 | Molybdopterin-binding protein |
| | | | | | KYG_10890 |
| 183_24_C18_10 | KJ802952 | 1 | 9640 | 9993 | alkylhydroperoxidase AhpD |
| 183_24_C18_11 | KJ802952 | 1 | 10024 | 10215 | putative transmembrane |
| | | | | | protein |
| 183_24_C18_12 | KJ802952 | 1 | 10313 | 11173 | metallo-beta-lactamase |
| | | | | | superfamily protein |
| 183_24_C18_13 | KJ802952 | 1 | 11279 | 11635 | ArsR family regulatory protein |
| 183_24_C18_14 | KJ802952 | 1 | 11638 | 12069 | hypothetical protein |
| | | | | | KYG_10920 |
| 183_24_C18_15 | KJ802952 | 1 | 12117 | 12557 | hypothetical protein |
| | | | | | KYG_10925 |
| 183_24_C18_16 | KJ802952 | 1 | 12559 | 12903 | hypothetical protein |
| | | | | | KYG_10930 |
| 183_24_C18_17 | KJ802952 | | 12934 | 14007 | site-specific recombinase |
| | | | | | XerD |
| 183_24_C18_18 | KJ802952 | | 14125 | 15120 | KfrA domain-containing |
| | | | | | protein DNA-binding d |
| 183_24_C18_19 | KJ802952 | | 15424 | 17808 | Diguanylate |
| | | | | | cyclase/phosphodiesterase |
| | | | | | domain |
| 183_24_C18_20 | KJ802952 | | 17987 | 18691 | short-chain |
| | | | | | dehydrogenase/reductase |
| | | | | | SDR |
| 183_24_C18_21 | KJ802952 | | 18782 | 20188 | mate efflux family protein |
| 183_24_C18_22 | KJ802952 | | 20185 | 20694 | MaoC-like protein |
| | | | | | dehydratase |
| 183_24_C18_23 | KJ802952 | | 20737 | 22014 | major facilitator transporter |
| 183_24_C18_24 | KJ802952 | | 22004 | 22504 | MarR family transcriptional |
| | | | | | regulator |
| 183_24_C18_25 | KJ802952 | | 22578 | 23129 | thioesterase superfamily |
| | | | | | protein |
| 183_24_C18_26 | KJ802952 | | 23126 | 23539 | lactoylglutathione lyase |
| 183_24_C18_27 | KJ802952 | | 23665 | 24270 | nicotinamidase-like amidase |
| 183_24_C18_28 | KJ802952 | | 24545 | 25135 | NLP/P60 protein |
| 183_24_C18_29 | KJ802952 | | 25183 | 25566 | hypothetical protein |
| | | | | | KYG_21454 |
| 183_24_C18_30 | KJ802952 | | 25776 | 26027 | putative membrane protein |
| 183_26_G23_1 | KJ802953 | | 1 | 1599 | cyanophycin synthetase |
| 183_26_G23_2 | KJ802953 | | 1596 | 2084 | CreA family protein |
| 183_26_G23_3 | KJ802953 | | 2175 | 2822 | DSBA oxidoreductase |
| 183_26_G23_4 | KJ802953 | | 3134 | 3418 | hypothetical protein |
| | | | | | KYG_20310 |
| 183_26_G23_5 | KJ802953 | | 3512 | 4894 | hypothetical protein |
| | | | | | PMI14_06112 |
| 183_26_G23_6 | KJ802953 | | 4943 | 6499 | glucose-6-phosphate |
| | | | | | isomerase |
| 183_26_G23_7 | KJ802953 | | 6649 | 7767 | 3-oxoacyl-ACP synthase |
| 183_26_G23_8 | KJ802953 | | 7847 | 8794 | transaldolase |
| 183_26_G23_9 | KJ802953 | | 8925 | 9770 | RpiR family transcriptional |
| | | | | | regulator |
| 183_26_G23_10 | KJ802953 | | 9877 | 10371 | PEBP family protein |
| 183_26_G23_11 | KJ802953 | | 10422 | 12326 | 5′-nucleotidase |
| 183_26_G23_12 | KJ802953 | | 12514 | 13518 | oligopeptide/dipeptide ABC |
| | | | | | transporter ATPase |
| 183_26_G23_13 | KJ802953 | | 13515 | 14495 | oligopeptide/dipeptide ABC |
| | | | | | transporter ATPase |
| 183_26_G23_14 | KJ802953 | | 14669 | 15580 | binding-protein-dependent |
| | | | | | transport systems i |
| 183_26_G23_15 | KJ802953 | | 15598 | 16815 | amidohydrolase |
| 183_26_G23_16 | KJ802953 | | 16817 | 17797 | binding-protein-dependent |
| | | | | | transport systems |
| 183_26_G23_17 | KJ802953 | | 17928 | 19508 | family 5 extracellular solute- |
| | | | | | binding protein |
| 183_26_G23_18 | KJ802953 | | 19811 | 20767 | porin |
| 183_26_G23_19 | KJ802953 | | 21084 | 21701 | ubiquinone biosynthesis |
| | | | | | protein COQ7 |
| 183_26_G23_20 | KJ802953 | | 21872 | 22321 | OsmC family protein |
| 183_26_G23_21 | KJ802953 | | 22634 | 24211 | threonine dehydratase |
| 183_26_G23_22 | KJ802953 | | 24510 | 25328 | cobalamin synthase |
| 183_26_G23_23 | KJ802953 | | 25325 | 25939 | phosphoglycerate mutase |
| 183_26_G23_24 | KJ802953 | | 25932 | 27578 | methyl-accepting chemotaxis |
| | | | | | sensory transduce |
| 183_26_G23_25 | KJ802953 | | 27764 | 29659 | thiamine biosynthesis protein |
| | | | | | ThiC |
| 183_26_G23_26 | KJ802953 | | 29919 | 30095 | hypothetical protein |
| | | | | | PMI12_02416 |
| 183_26_G23_27 | KJ802953 | | 30113 | 31036 | udp-3-0-acyl n- |
| | | | | | acetylglucosamine |
| | | | | | deacetylase |
| 183_26_G23_28 | KJ802953 | | 31147 | 32382 | cell division protein FtsZ |
| 183_26_G23_29 | KJ802953 | | 32543 | 33772 | cell division protein FtsA |
| 183_26_G23_30 | KJ802953 | | 33805 | 34593 | polypeptide-transport- |
| | | | | | associated domain-conta |
| 183_26_G23_31 | KJ802953 | | 34590 | 35576 | D-alanine/D-alanine ligase |
| 183_26_G23_32 | KJ802953 | | 35576 | 37006 | UDP-N-acetylmuramate--L- |
| | | | | | alanine ligase |
| 183_26_G23_33 | KJ802953 | | 37003 | 38088 | undecaprenyldiphospho- |
| | | | | | muramoylpentapeptide be |
| 183_52_O2_1 | KJ802957 | 1 | 1 | 5196 | hypothetical protein |
| | | | | | DelCs14_2697 |
| 183_52_O2_3 | KJ802957 | | 5430 | 5777 | putative signal peptide protein |
| 183_52_O2_4 | KJ802957 | | 6304 | 9102 | hsdR gene product |
| 183_52_O2_5 | KJ802957 | | 9115 | 10824 | hsdM gene product |
| 183_52_O2_6 | KJ802957 | | 10821 | 12416 | restriction modification |
| | | | | | system DNA specific |
| 183_52_O2_7 | KJ802957 | | 12413 | 14287 | hypothetical protein |
| | | | | | AZA_26080 |
| 183_52_O2_8 | KJ802957 | | 14287 | 15369 | hypothetical protein |
| 183_52_O2_9 | KJ802957 | | 15453 | 16082 | hypothetical protein ebA2393 |
| 183_52_O2_10 | KJ802957 | | 16057 | 17226 | transcriptional regulator |
| 183_52_O2_11 | KJ802957 | | 17223 | 18596 | hypothetical protein |
| | | | | | NCGM1179_3188 |
| 183_52_O2_12 | KJ802957 | | 18593 | 19159 | hypothetical protein ebA2389 |
| 183_52_O2_13 | KJ802957 | | 19305 | 19679 | ISxac2 transposase |
| 183_52_O2_14 | KJ802957 | | 19977 | 20654 | hypothetical protein |
| | | | | | PfISS101_1461 |
| 183_52_O2_16 | KJ802957 | | 20891 | 21238 | Uncharacterized protein y4hO |
| 183_52_O2_17 | KJ802957 | | 21385 | 21630 | prevent-host-death protein |
| 183_52_O2_18 | KJ802957 | | 21620 | 21904 | plasmid stabilization system |
| | | | | | protein |
| 183_52_O2_19 | KJ802957 | | 22164 | 22661 | DNA repair protein RadC |
| 183_52_O2_20 | KJ802957 | | 22636 | 23583 | hypothetical protein |
| | | | | | PAE2_4137 |
| 183_52_O2_21 | KJ802957 | | 23673 | 24677 | Phage-like protein |
| | | | | | endonuclease-like protein |
| 183_52_O2_22 | KJ802957 | | 24752 | 25720 | phage/plasmid-related protein |
| 183_52_O2_23 | KJ802957 | | 25827 | 26156 | hypothetical protein |
| | | | | | PMI22_03690 |
| 183_52_O2_24 | KJ802957 | | 26498 | 26983 | hypothetical protein |
| | | | | | Alide2_0008 |
| 183_52_O2_25 | KJ802957 | | 26995 | 27666 | hypothetical protein |
| | | | | | Despr_1026 |
| 183_52_O2_26 | KJ802957 | | 28373 | 29053 | hypothetical protein |
| | | | | | NiasoDRAFT_3049 |
| 183_52_O2_27 | KJ802957 | | 29252 | 29497 | prevent-host-death family |
| | | | | | protein |
| 183_52_O2_28 | KJ802957 | | 29642 | 29914 | hypothetical protein |
| | | | | | PseS9_11520 |
| 183_52_O2_29 | KJ802957 | | 30192 | 31598 | phage integrase |
| 183_52_O2_30 | KJ802957 | | 32163 | 33104 | electron transfer flavoprotein |
| | | | | | subunit alpha |
| 183_52_O2_31 | KJ802957 | | 33104 | 33853 | electron transfer flavoprotein, |
| | | | | | beta subunit |
| 183_52_O2_32 | KJ802957 | | 34019 | 34807 | enoyl-CoA |
| | | | | | hydratase/isomerase |
| 183_52_O2_33 | KJ802957 | | 34838 | 35590 | phbA2 gene product |
| 183_42_E18_1 | KJ802956 | | 364 | 645 | addiction module toxin, |
| | | | | | RelE/StbE family protein |
| 183_42_E18_2 | KJ802956 | | 635 | 883 | prevent-host-death family |
| | | | | | protein |
| 183_42_E18_3 | KJ802956 | | 1120 | 1518 | conserved hypothetical |
| | | | | | protein |
| 183_42_E18_4 | KJ802956 | | 1586 | 1930 | transcriptional regulator, ArsR |
| | | | | | family |
| 183_42_E18_5 | KJ802956 | | 2079 | 2288 | hypothetical protein |
| 183_42_E18_6 | KJ802956 | | 2303 | 2584 | Rhodanese domain protein |
| 183_42_E18_7 | KJ802956 | | 2608 | 3054 | OsmC family protein |
| 183_42_E18_8 | KJ802956 | | 3089 | 3280 | putative transmembrane |
| | | | | | protein |
| 183_42_E18_9 | KJ802956 | | 3381 | 4460 | biotin synthase |
| 183_42_E18_10 | KJ802956 | | 4924 | 5808 | universal stress protein |
| 183_42_E18_11 | KJ802956 | | 5829 | 6305 | lactoylglutathione lyase |
| 183_42_E18_12 | KJ802956 | | 6434 | 8482 | carbamoyl-phosphate |
| | | | | | synthase I chain ATP-bind |
| 183_42_E18_13 | KJ802956 | | 8504 | 10036 | carboxyl transferase |
| 183_42_E18_14 | KJ802956 | | 10079 | 11107 | LAO/AO transport system |
| | | | | | ATPase |
| 183_42_E18_15 | KJ802956 | | 11104 | 13272 | methylmalonyl-CoA mutase |
| 183_42_E18_16 | KJ802956 | | 13394 | 14029 | GntR family transcriptional |
| | | | | | regulator |
| 183_42_E18_17 | KJ802956 | | 14033 | 15367 | Ferric reductase domain |
| | | | | | protein transmembrane |
| 183_42_E18_18 | KJ802956 | | 15582 | 17420 | AMP-dependent synthetase |
| | | | | | and ligase |
| 183_42_E18_19 | KJ802956 | | 17539 | 18234 | Protein of unknown function |
| | | | | | (DUF3334) |
| 183_42_E18_20 | KJ802956 | | 18235 | 19356 | saccharopine dehydrogenase |
| 183_42_E18_21 | KJ802956 | | 19498 | 19950 | AsnC family transcriptional |
| | | | | | regulator |
| 183_42_E18_22 | KJ802956 | | 20036 | 21010 | Endonuclease/exonuclease/phosphatase |
| 183_42_E18_23 | KJ802956 | | 21061 | 21492 | hypothetical protein |
| | | | | | IMCC1989_1692 |
| 183_42_E18_24 | KJ802956 | | 22174 | 22764 | phospholipid/glycerol |
| | | | | | acyltransferase |
| 183_42_E18_25 | KJ802956 | | 22971 | 23486 | outer membrane |
| | | | | | protein/peptidoglycan-associat |
| 183_42_E18_26 | KJ802956 | | 23544 | 24134 | ChaC family protein |
| 183_42_E18_27 | KJ802956 | | 24156 | 24812 | pyridoxamine 5′-phosphate |
| | | | | | oxidase |
| 183_42_E18_28 | KJ802956 | | 24822 | 25088 | hypothetical protein |
| | | | | | AcdelDRAFT_1713 |
| 183_42_E18_29 | KJ802956 | | 25093 | 26049 | auxin efflux carrier |
| 183_42_E18_30 | KJ802956 | | 26152 | 27405 | chromate ion transporter |
| 183_42_E18_31 | KJ802956 | | 27490 | 29130 | GMP synthase, large subunit |
| 183_42_E18_32 | KJ802956 | | 29208 | 30683 | inosine-5′-monophosphate |
| | | | | | dehydrogenase |
| 183_42_E18_33 | KJ802956 | | 30760 | 31272 | hypothetical protein |
| | | | | | KYG_06529 |
| 183_42_E18_34 | KJ802956 | | 31295 | 31633 | hypothetical protein |
| | | | | | PMI14_04152 |
| 183_42_E18_35 | KJ802956 | | 31626 | 32066 | cyclase/dehydrase |
| 183_42_E18_36 | KJ802956 | | 32201 | 32674 | SsrA-binding protein |
| 183_42_E18_37 | KJ802956 | | 32775 | 33140 | secreted repeat protein |
| 183_42_E18_38 | KJ802956 | | 33160 | 33666 | RNA polymerase subunit |
| | | | | | sigma-24 |
| 182_10_L09_1 | KJ802939 | | 3 | 236 | LemA family protein |
| 182_10_L09_2 | KJ802939 | | 334 | 2166 | Heat shock protein HtpX |
| 182_10_L09_3 | KJ802939 | | 2373 | 2813 | hypothetical protein |
| | | | | | Tmz1t_2019 |
| 182_10_L09_4 | KJ802939 | | 3060 | 3941 | Putative alpha/beta- |
| | | | | | Hydrolase |
| 182_10_L09_5 | KJ802939 | | 4029 | 5195 | major facilitator transporter |
| 182_10_L09_6 | KJ802939 | | 5297 | 7114 | excinuclease ABC subunit C |
| 182_10_L09_7 | KJ802939 | | 7315 | 8460 | beta-hexosaminidase |
| 182_10_L09_8 | KJ802939 | | 8457 | 8837 | holo-acyl-carrier-protein |
| | | | | | synthase |
| 182_10_L09_9 | KJ802939 | | 8866 | 9621 | pyridoxine 5′-phosphate |
| | | | | | synthase |
| 182_10_L09_10 | KJ802939 | | 9621 | 10373 | DNA repair protein RecO |
| 182_10_L09_11 | KJ802939 | | 10389 | 11321 | GTP-binding protein Era |
| 182_10_L09_12 | KJ802939 | | 11318 | 11989 | ribonuclease III |
| 182_10_L09_13 | KJ802939 | | 11994 | 12350 | hypothetical protein |
| | | | | | Tmz1t_2313 |
| 182_10_L09_14 | KJ802939 | | 12423 | 13211 | lepB gene product |
| 182_10_L09_15 | KJ802939 | | 13260 | 15056 | GTP-binding protein LepA |
| 182_10_L09_16 | KJ802939 | | 15124 | 15399 | glutaredoxin |
| 182_10_L09_17 | KJ802939 | | 15396 | 16847 | protease Do |
| 182_10_L09_18 | KJ802939 | | 16844 | 17314 | positive regulator of sigma E, |
| | | | | | RseC/MucC |
| 182_10_L09_19 | KJ802939 | | 17311 | 18282 | sigma E regulatory protein, |
| | | | | | MucB/RseB |
| 182_10_L09_20 | KJ802939 | | 18279 | 18824 | anti sigma-E protein, RseA |
| 182_10_L09_21 | KJ802939 | 1 | 18834 | 19433 | algU gene product |
| 182_10_L09_22 | KJ802939 | 1 | 19622 | 21262 | L-aspartate oxidase |
| 182_10_L09_23 | KJ802939 | 1 | 21343 | 21852 | hypothetical protein |
| 182_10_L09_24 | KJ802939 | 1 | 21880 | 23115 | fabF1 gene product |
| 182_10_L09_25 | KJ802939 | 1 | 23217 | 23456 | acyl carrier protein |
| 182_10_L09_26 | KJ802939 | 1 | 23548 | 24297 | 3-ketoacyl-(acyl-carrier- |
| | | | | | protein) reductase |
| 182_10_L09_27 | KJ802939 | 1 | 24301 | 25230 | malonyl CoA-acyl carrier |
| | | | | | protein transacylas |
| 182_10_L09_28 | KJ802939 | 1 | 25267 | 26232 | 3-oxoacyl-(acyl carrier |
| | | | | | protein) synthase II |
| 182_10_L09_29 | KJ802939 | 1 | 26229 | 27245 | glycerol-3-phosphate |
| | | | | | acyltransferase PlsX |
| 182_10_L09_30 | KJ802939 | 1 | 27339 | 27518 | rpmF gene product |
| 182_10_L09_31 | KJ802939 | 1 | 27548 | 28072 | metal-binding protein |
| 182_10_L09_32 | KJ802939 | 1 | 28253 | 28828 | maf protein |
| 182_10_L09_33 | KJ802939 | 1 | 28825 | 29574 | uroporphyrin-III C/tetrapyrrole |
| | | | | | methyltransf |
| 182_10_L09_34 | KJ802939 | 1 | 29656 | 30312 | HAD-superfamily hydrolase |
| 182_07_C02_1 | KJ802936 | | 3 | 281 | hypothetical protein ebB27 |
| 182_07_C02_2 | KJ802936 | | 278 | 457 | hypothetical protein NE1441 |
| 182_07_C02_3 | KJ802936 | | 483 | 2396 | hypothetical protein ebA893 |
| 182_07_C02_4 | KJ802936 | | 2545 | 3435 | cysteine synthase B |
| 182_07_C02_5 | KJ802936 | | 3493 | 4668 | tetratricopeptide repeat |
| | | | | | protein |
| 182_07_C02_6 | KJ802936 | | 4674 | 4982 | hypothetical protein |
| | | | | | Tmz1t_3033 |
| 182_07_C02_7 | KJ802936 | | 5070 | 5357 | integration host factor subunit |
| | | | | | beta |
| 182_07_C02_8 | KJ802936 | | 5369 | 7072 | 30S ribosomal protein S1 |
| 182_07_C02_9 | KJ802936 | | 7161 | 9113 | bifunctional 3- |
| | | | | | phosphoshikimate 1- |
| | | | | | carboxyvin |
| 182_07_C02_10 | KJ802936 | | 9205 | 10092 | prephenate dehydrogenase |
| 182_07_C02_11 | KJ802936 | | 10106 | 11203 | histidinol-phosphate |
| | | | | | aminotransferase |
| 182_07_C02_12 | KJ802936 | | 11382 | 12449 | chorismate mutase |
| 182_07_C02_13 | KJ802936 | | 12520 | 13617 | phosphoserine |
| | | | | | aminotransferase |
| 182_07_C02_14 | KJ802936 | | 13617 | 16283 | DNA gyrase subunit A |
| 182_07_C02_15 | KJ802936 | | 16421 | 17023 | heat shock protein GrpE |
| 182_07_C02_16 | KJ802936 | | 17174 | 19090 | molecular chaperone DnaK |
| 182_07_C02_17 | KJ802936 | | 19187 | 20311 | chaperone protein DnaJ |
| 182_07_C02_18 | KJ802936 | | 20468 | 20959 | hypothetical protein |
| | | | | | AZL_009250 |
| 182_07_C02_19 | KJ802936 | | 21014 | 22399 | cysteinyl-tRNA synthetase |
| 182_07_C02_20 | KJ802936 | | 22638 | 23228 | cyclophilin type peptidyl-prolyl |
| | | | | | cis-trans i |
| 182_07_C02_21 | KJ802936 | | 23271 | 23765 | cyclophilin type peptidyl-prolyl |
| | | | | | cis-trans i |
| 182_07_C02_22 | KJ802936 | | 23812 | 24579 | IpxH gene product |
| 182_07_C02_23 | KJ802936 | | 24742 | 25392 | hypothetical protein |
| | | | | | Tmz1t_0120 |
| 182_07_C02_24 | KJ802936 | | 25550 | 26485 | purC gene product |
| 182_07_C02_25 | KJ802936 | | 26559 | 27821 | sugar phosphate permease |
| 182_07_C02_26 | KJ802936 | | 28000 | 28773 | hypothetical protein |
| | | | | | Tmz1t_1482 |
| 182_07_C02_27 | KJ802936 | | 28935 | 31043 | oligopeptidase A |
| 182_07_C02_28 | KJ802936 | | 31065 | 33251 | PAS/PAC sensor-containing |
| | | | | | diguanylate cycl |
| 182_07_C02_29 | KJ802936 | | 33248 | 33631 | methyl-accepting chemotaxis |
| | | | | | sensory transduc |
| 182_13_A07_1 | KJ802941 | | 268 | 2289 | methyl-accepting chemotaxis |
| | | | | | protein |
| 182_13_A07_2 | KJ802941 | | 2407 | 3087 | hypothetical protein |
| | | | | | A458_15285 |
| 182_13_A07_3 | KJ802941 | | 3100 | 3831 | hypothetical protein |
| | | | | | A458_15280 |
| 182_13_A07_4 | KJ802941 | | 3890 | 4246 | hypothetical protein |
| | | | | | A458_15275 |
| 182_13_A07_5 | KJ802941 | | 4461 | 6308 | sodium/sulfate symporter |
| | | | | | family protein |
| 182_13_A07_6 | KJ802941 | | 6537 | 7493 | alpha/beta hydrolase |
| 182_13_A07_7 | KJ802941 | | 7490 | 7966 | transcription elongation factor |
| 182_13_A07_8 | KJ802941 | | 8071 | 10011 | DNA topoisomerase III |
| 182_13_A07_9 | KJ802941 | | 10200 | 10412 | hypothetical protein |
| | | | | | A458_15250 |
| 182_13_A07_10 | KJ802941 | | 10540 | 11769 | proton-glutamate symporter |
| 182_13_A07_11 | KJ802941 | | 11964 | 12287 | hypothetical protein |
| | | | | | A458_15240 |
| 182_13_A07_12 | KJ802941 | | 12359 | 13084 | hypothetical protein |
| | | | | | PstZobell_07400 |
| 182_13_A07_13 | KJ802941 | | 13610 | 14536 | ABC transporter permease |
| 182_13_A07_14 | KJ802941 | | 14602 | 15708 | ABC transporter permease |
| 182_13_A07_15 | KJ802941 | | 15721 | 17277 | ABC transporter ATP-binding |
| | | | | | protein |
| 182_13_A07_16 | KJ802941 | | 17529 | 18449 | transcriptional regulator |
| 182_13_A07_17 | KJ802941 | | 18451 | 18906 | gamma- |
| | | | | | carboxymuconolactone |
| | | | | | decarboxylase |
| 182_13_A07_18 | KJ802941 | | 18917 | 19654 | short-chain dehydrogenase |
| 182_13_A07_19 | KJ802941 | | 19777 | 20247 | tRNA-specific adenosine |
| | | | | | deaminase |
| 182_13_A07_20 | KJ802941 | | 20284 | 21078 | ABC transporter permease |
| 182_13_A07_21 | KJ802941 | | 21065 | 21868 | ABC transporter ATP-binding |
| | | | | | protein |
| 182_13_A07_22 | KJ802941 | | 21873 | 22850 | hypothetical protein |
| 182_13_A07_23 | KJ802941 | | 22901 | 23650 | putative alkyl salicylate |
| | | | | | esterase |
| 182_13_A07_24 | KJ802941 | | 23643 | 24623 | non-heme iron-dependent |
| | | | | | enzyme |
| 182_13_A07_25 | KJ802941 | | 24916 | 27147 | PAS/PAC sensor hybrid |
| | | | | | histidine kinase |
| 182_13_A07_26 | KJ802941 | | 27386 | 29071 | PAS domain S-box |
| 182_13_A07_27 | KJ802941 | | 29055 | 30581 | circadian oscillation regulator |
| 182_13_A07_28 | KJ802941 | | 31019 | 32320 | putative ABC1 protein |
| 182_13_A07_29 | KJ802941 | | 32341 | 33042 | short chain |
| | | | | | dehydrogenase/reductase |
| | | | | | family oxidor |
| 182_13_A07_30 | KJ802941 | | 33015 | 35147 | PAS domain S-box |
| 182_13_A07_31 | KJ802941 | | 35567 | 37240 | gamma-glutamyltransferase |
| 182_13_A07_32 | KJ802941 | | 37373 | 37765 | glyoxalase/bleomycin |
| | | | | | resistance protein/diox |
| 182_13_A07_34 | KJ802941 | | 38308 | 38778 | hypothetical protein |
| | | | | | PST_2282 |
| 182_13_A07_35 | KJ802941 | | 39005 | 39409 | hypothetical protein |
| | | | | | Pext1s1_03389 |
| 182_13_A07_36 | KJ802941 | | 39862 | 40545 | LysR family transcriptional |
| | | | | | regulator |
| 183_29_M04_1 | KJ802954 | | 1 | 1551 | K+ potassium transporter |
| 183_29_M04_2 | KJ802954 | | 1697 | 2887 | benzoate transporter |
| 183_29_M04_3 | KJ802954 | | 2925 | 3881 | glutathione synthetase |
| 183_29_M04_4 | KJ802954 | 1 | 9978 | 10829 | integrase catalytic subunit |
| 183_29_M04_5 | KJ802954 | 1 | 10883 | 11209 | transposase is3/is911 family |
| | | | | | protein |
| 183_29_M04_6 | KJ802954 | 1 | 11257 | 11910 | DSBA oxidoreductase, Twin- |
| | | | | | arginine translocation pathway |
| | | | | | signal |
| 183_29_M04_7 | KJ802954 | 1 | 11965 | 12582 | sporulation domain-containing |
| | | | | | protein |
| 183_29_M04_8 | KJ802954 | 1 | 12597 | 14294 | arginyl-tRNA synthetase |
| 183_29_M04_9 | KJ802954 | 1 | 14348 | 14806 | hypothetical protein |
| | | | | | Acav_0473 |
| 183_29_M04_10 | KJ802954 | 1 | 14803 | 15735 | transcriptional regulator, LysR |
| | | | | | family |
| 183_29_M04_11 | KJ802954 | 1 | 15857 | 17803 | coenzyme A transferase |
| 183_29_M04_12 | KJ802954 | 1 | 18008 | 20209 | malate synthase G |
| 183_29_M04_13 | KJ802954 | 1 | 20320 | 20661 | putative monovalent |
| | | | | | cation/H+ antiporter subu |
| 183_29_M04_14 | KJ802954 | 1 | 20672 | 20947 | putative monovalent |
| | | | | | cation/H+ antiporter subu |
| 183_29_M04_15 | KJ802954 | 1 | 20944 | 21519 | putative K(+)/H(+) antiporter |
| | | | | | subunit E |
| 183_29_M04_16 | KJ802954 | 1 | 21516 | 23150 | putative monovalent |
| | | | | | cation/H+ antiporter subu |
| 183_29_M04_17 | KJ802954 | 1 | 23150 | 23542 | putative monovalent |
| | | | | | cation/H+ antiporter subu |
| 183_29_M04_18 | KJ802954 | 1 | 23598 | 26441 | putative monovalent |
| | | | | | cation/H+ antiporter subu |
| 183_29_M04_19 | KJ802954 | 1 | 27298 | 27486 | 4-oxalocrotonate tautomerase |
| 183_29_M04_20 | KJ802954 | 1 | 27661 | 29133 | emrB/QacA subfamily drug |
| | | | | | resistance transport |
| 183_29_M04_21 | KJ802954 | 1 | 29155 | 29922 | class-II glutamine |
| | | | | | amidotransferase |
| 183_29_M04_22 | KJ802954 | 1 | 29949 | 30329 | glyoxalase/bleomycin |
| | | | | | resistance protein/dioxy |
| 183_29_M04_23 | KJ802954 | 1 | 30741 | 31250 | hypothetical protein |
| | | | | | KYG_01427 |
| 183_29_M04_24 | KJ802954 | 1 | 32011 | 32952 | hypothetical protein |
| | | | | | Rfer_4013 |
| 183_29_M04_25 | KJ802954 | 1 | 33103 | 34191 | transposase, IS4 family |
| | | | | | protein |
| 183_29_M04_26 | KJ802954 | 1 | 34340 | 34744 | hypothetical protein |
| | | | | | Tmz1t_3596 |
| 183_29_M04_27 | KJ802954 | | 34968 | 37064 | hypothetical protein |
| 183_29_M04_28 | KJ802954 | | 37080 | 37703 | putative transposon resolvase |
| 183_29_M04_29 | KJ802954 | | 37795 | 40803 | transposase |
| 183_29_M04_30 | KJ802954 | | 40800 | 41213 | hypothetical protein |
| | | | | | Tmz1t_3596 |
| 183_38_D19_1 | KJ802955 | | 3 | 1949 | parvulin-like peptidyl-prolyl |
| | | | | | isomerase |
| 183_38_D19_2 | KJ802955 | | 2032 | 2817 | ABC-type antimicrobial |
| | | | | | peptide transport syst |
| 183_38_D19_3 | KJ802955 | | 2810 | 3808 | oligopeptide/dipeptide ABC |
| | | | | | transporter, ATP-b |
| 183_38_D19_4 | KJ802955 | | 3808 | 4701 | ABC-type antimicrobial |
| | | | | | peptide transport syst |
| 183_38_D19_5 | KJ802955 | | 4703 | 5722 | ABC-type antimicrobial |
| | | | | | peptide transport syst |
| 183_38_D19_6 | KJ802955 | | 5719 | 7329 | dipeptide transport system |
| | | | | | substrate-binding |
| 183_38_D19_7 | KJ802955 | | 7326 | 8423 | psp operon transcriptional |
| | | | | | activator PspF |
| 183_38_D19_8 | KJ802955 | | 8608 | 9276 | phage shock protein A |
| 183_38_D19_9 | KJ802955 | | 9302 | 9544 | phage shock protein B |
| 183_38_D19_10 | KJ802955 | | 9531 | 9941 | phage shock protein C |
| 183_38_D19_11 | KJ802955 | | 9987 | 11363 | hypothetical protein |
| | | | | | AGRI_06402 |
| 183_38_D19_12 | KJ802955 | | 11360 | 12379 | UPF0283 membrane protein |
| 183_38_D19_13 | KJ802955 | | 12512 | 13717 | methionine gamma-lyase |
| 183_38_D19_14 | KJ802955 | | 13894 | 14685 | phenylalanine 4- |
| | | | | | monooxygenase |
| 183_38_D19_15 | KJ802955 | | 14729 | 15070 | pterin-4-alpha-carbinolamine |
| | | | | | dehydratase |
| 183_38_D19_16 | KJ802955 | | 15219 | 16781 | transcriptional regulator of |
| | | | | | aroF, aroG, tyrA |
| 183_38_D19_17 | KJ802955 | | 16999 | 18072 | 4-hydroxyphenylpyruvate |
| | | | | | dioxygenase |
| 183_38_D19_18 | KJ802955 | | 18065 | 19204 | homogentisate 1,2- |
| | | | | | dioxygenase |
| 183_38_D19_19 | KJ802955 | | 19272 | 20294 | 2-keto-4-pentenoate |
| | | | | | hydratase/2-oxohepta-3-en |
| 183_38_D19_20 | KJ802955 | | 20380 | 21018 | maleylacetoacetate |
| | | | | | isomerase |
| 183_38_D19_21 | KJ802955 | | 21220 | 22398 | response regulator |
| 183_38_D19_23 | KJ802955 | | 22819 | 24411 | lytic murein transglycosylase |
| 183_38_D19_24 | KJ802955 | | 24543 | 25322 | hydroxyacylglutathione |
| | | | | | hydrolase |
| 183_38_D19_25 | KJ802955 | | 25385 | 26119 | SAM-dependent |
| | | | | | methyltransferase |
| 183_38_D19_26 | KJ802955 | | 26180 | 26626 | hypothetical protein |
| 183_38_D19_27 | KJ802955 | | 26610 | 27194 | acetyltransferase |
| 183_38_D19_28 | KJ802955 | | 27506 | 28039 | hypothetical protein |
| | | | | | Rhein_1400 |
| 183_38_D19_29 | KJ802955 | | 28188 | 29513 | DNA/RNA helicase, |
| | | | | | superfamily II |
| 183_38_D19_30 | KJ802955 | | 29799 | 30011 | cold shock protein |
| 183_38_D19_31 | KJ802955 | | 30225 | 31280 | nucleotidyltransferase/DNA |
| | | | | | polymerase involve |
| 183_38_D19_32 | KJ802955 | | 31559 | 32812 | glycine |
| | | | | | hydroxymethyltransferase |
| 183_38_D19_33 | KJ802955 | | 32881 | 33333 | transcriptional regulator NrdR |
| 183_38_D19_34 | KJ802955 | | 33337 | 34458 | riboflavin biosynthesis protein |
| | | | | | RibD |
| 183_38_D19_35 | KJ802955 | | 34461 | 35111 | riboflavin synthase |
| 183_38_D19_36 | KJ802955 | | 35160 | 36269 | 3,4-dihydroxy-2-butanone 4- |
| | | | | | phosphate synthase |
| 183_38_D19_37 | KJ802955 | | 36428 | 36892 | 6,7-dimethyl-8-ribityllumazine |
| | | | | | synthase |
| 183_38_D19_38 | KJ802955 | | 36902 | 37315 | transcription antitermination |
| | | | | | factor NusB |
| 183_38_D19_39 | KJ802955 | | 37344 | 38303 | thiamine-monophosphate |
| | | | | | kinase |
| 183_38_D19_40 | KJ802955 | | 38303 | 38779 | phosphatidylglycerophosphatase A |
| 183_38_D19_41 | KJ802955 | | 38807 | 40009 | diguanylate cyclase (GGDEF) |
| | | | | | domain-containing |
| 182_19_A11_2 | KJ802946 | | 141 | 1979 | diguanylate |
| | | | | | cyclase/phosphodiesterase |
| 182_19_A11_3 | KJ802946 | | 2349 | 3086 | FKBP-type peptidylprolyl |
| | | | | | isomerase |
| 182_19_A11_4 | KJ802946 | | 3739 | 4656 | recombination associated |
| | | | | | protein |
| 182_19_A11_5 | KJ802946 | 1 | 4756 | 6153 | flagellar hook protein FlgE |
| 182_19_A11_6 | KJ802946 | 1 | 6190 | 6873 | flagellar basal body rod |
| | | | | | modification protei |
| 182_19_A11_7 | KJ802946 | 1 | 6886 | 7329 | flgC gene product |
| 182_19_A11_8 | KJ802946 | 1 | 7332 | 7736 | flagellar basal body rod |
| | | | | | protein FlgB |
| 182_19_A11_9 | KJ802946 | 1 | 7960 | 9789 | glmS gene product |
| 182_19_A11_10 | KJ802946 | 1 | 9804 | 10820 | UDP-glucose 4-epimerase |
| 182_19_A11_11 | KJ802946 | 1 | 10845 | 12338 | glutamyl-tRNA synthetase |
| 182_19_A11_12 | KJ802946 | 1 | 12403 | 13317 | LysR family transcriptional |
| | | | | | regulator |
| 182_19_A11_13 | KJ802946 | 1 | 13422 | 14453 | secretion protein HlyD family |
| | | | | | protein |
| 182_19_A11_14 | KJ802946 | 1 | 14446 | 15981 | EmrB/QacA family drug |
| | | | | | resistance transporter |
| 182_19_A11_15 | KJ802946 | 1 | 16187 | 17467 | glycine/D-amino acid oxidase |
| 182_19_A11_16 | KJ802946 | 1 | 17545 | 17946 | hypothetical protein |
| | | | | | A471_09819 |
| 182_19_A11_17 | KJ802946 | 1 | 17946 | 18896 | TPR repeat-containing protein |
| 182_19_A11_18 | KJ802946 | 1 | 19113 | 20759 | nitrite reductase |
| 182_19_A11_19 | KJ802946 | 1 | 20832 | 21188 | cytochrome c551/c552 |
| 182_19_A11_20 | KJ802946 | 1 | 21268 | 21870 | tetraheme protein NirT |
| 182_19_A11_21 | KJ802946 | 1 | 21922 | 22800 | denitrification system |
| | | | | | component cytochrome |
| 182_19_A11_22 | KJ802946 | 1 | 22859 | 24058 | TPR repeat-containing protein |
| 182_19_A11_23 | KJ802946 | 1 | 24273 | 25292 | tRNA-dihydrouridine synthase A |
| 182_19_A11_24 | KJ802946 | 1 | 25344 | 26297 | transaldolase B |
| 182_19_A11_25 | KJ802946 | 1 | 26286 | 26774 | anti-sigma-factor antagonist |
| 182_19_A11_26 | KJ802946 | 1 | 26771 | 27961 | response regulator receiver |
| | | | | | protein |
| 182_19_A11_27 | KJ802946 | 1 | 28154 | 28459 | type IV pilus assembly PilZ |
| 182_19_A11_28 | KJ802946 | 1 | 28456 | 29169 | VacJ family lipoprotein |
| 182_19_A11_29 | KJ802946 | 1 | 29335 | 30486 | RND family efflux transporter |
| | | | | | MFP subunit |
| 182_19_A11_30 | KJ802946 | 1 | 30490 | 32436 | macB gene product |
| 182_19_A11_31 | KJ802946 | 1 | 32426 | 32797 | RND efflux system, outer |
| | | | | | membrane |
| 182_06_L14_1 | 182_08_C21_4 | | 2 | 220 | hypothetical protein |
| | | | | | PSJM300_10595 |
| 182_06_L14_2 | KJ802935 | | 234 | 911 | hypothetical protein |
| | | | | | PstZobell_17634 |
| 182_06_L14_3 | KJ802935 | | 1053 | 1565 | antirestriction protein family |
| | | | | | protein |
| 182_06_L14_4 | KJ802935 | | 1863 | 3059 | hypothetical protein |
| | | | | | PST_0625 |
| 182_06_L14_5 | KJ802935 | | 3059 | 3310 | XRE family transcriptional |
| | | | | | regulator |
| 182_06_L14_6 | KJ802935 | | 3685 | 3933 | hypothetical protein |
| | | | | | PSJM300_10590 |
| 182_06_L14_7 | KJ802935 | | 3934 | 4416 | hypothetical protein |
| | | | | | PSJM300_10585 |
| 182_06_L14_8 | KJ802935 | | 4510 | 5193 | ifsy-2 prophage protein |
| 182_06_L14_9 | KJ802935 | | 5280 | 8369 | error-prone DNA polymerase |
| 182_06_L14_10 | KJ802935 | | 8840 | 9529 | DNA-specific endonuclease I |
| 182_06_L14_11 | KJ802935 | 1 | 9671 | 11902 | PAS/PAC sensor hybrid |
| | | | | | histidine kinase |
| 182_06_L14_12 | KJ802935 | 1 | 12132 | 12932 | hypothetical protein |
| | | | | | CF510_08712 |
| 182_06_L14_14 | KJ802935 | 1 | 13469 | 13801 | hypothetical protein |
| 182_06_L14_16 | KJ802935 | 1 | 14375 | 15694 | hypothetical protein |
| | | | | | Aasi_0901 |
| 182_06_L14_17 | KJ802935 | 1 | 15676 | 16353 | hypothetical protein |
| | | | | | HMPREF9551_05665 |
| 182_06_L14_18 | KJ802935 | 1 | 16350 | 18029 | ABC-type transporter, |
| | | | | | ATPase and permease co |
| 182_06_L14_19 | KJ802935 | 1 | 18139 | 19035 | Zn-dependent hydrolase |
| 182_06_L14_20 | KJ802935 | 1 | 19160 | 20149 | AraC family transcriptional |
| | | | | | regulator |
| 182_06_L14_21 | KJ802935 | 1 | 20256 | 20804 | isochorismatase hydrolase |
| 182_06_L14_22 | KJ802935 | 1 | 21288 | 22250 | AraC family transcriptional |
| | | | | | regulator |
| 182_06_L14_23 | KJ802935 | 1 | 22438 | 22917 | 3-demethylubiquinone-9 3- |
| | | | | | methyltransferase |
| 182_06_L14_24 | KJ802935 | 1 | 22998 | 23756 | amino-acid ABC transporter |
| | | | | | ATP-binding prote |
| 182_06_L14_25 | KJ802935 | 1 | 23756 | 24424 | cystine ABC transporter, |
| | | | | | permease protein, p |
| 182_06_L14_26 | KJ802935 | 1 | 24421 | 25215 | cystine transporter subunit |
| 182_06_L14_27 | KJ802935 | 1 | 25320 | 26324 | D-cysteine desulfhydrase |
| 182_06_L14_28 | KJ802935 | 1 | 26423 | 27145 | transcriptional activator |
| 182_06_L14_29 | KJ802935 | 1 | 27333 | 27599 | hypothetical protein |
| | | | | | PSJM300_10525 |
| 182_06_L14_30 | KJ802935 | | 28295 | 29581 | hypothetical protein |
| | | | | | Nwat_3173 |
| 182_06_L14_31 | KJ802935 | | 29600 | 31267 | conserved hypothetical |
| | | | | | protein |
| 182_06_L14_32 | KJ802935 | | 31264 | 33141 | putative chromosome |
| | | | | | segregation ATPase |
| 182_06_L14_33 | KJ802935 | | 33151 | 33663 | hypothetical protein ec01045 |

The application's sequence listing, which the Patent Office published only in electronic form, follows.

SEQUENCE LISTING (96 sequences)

SEQ ID NO: 1 - DNA, 1182 bp, Unknown
  From Metagenomic library of CO182/CO183
  misc_feature (1143)..(1160): n is a, c, g, or t
gtgaatgaggccgatactgcgacgccccgcgcgggagtcaccatcgacgatctattcaaaacattttgtgtgcgtaaaagtgttttggctacctatgaattgccacccgggcacctgtgtgataccccgggcgacccgtcctcgcgcgacaatgccccgatgaacccacccaagccccctgctctctccatgctcgacctggtggccgtccgcgaaggcggcaccgtggccgatgccttggccattgccctgcgcacggcgcagcacgccgaatcgctgggctttcagcgctactggctggccgagcaccacaacatgcagggcattgccagctccgccaccgccgtgctggtgggccacatcgcgggcggcacgcagcgcatgcgcgtgggctcgggcggcgtgatgctgcccaaccacgcaccgctggtggtggccgaggcctttggcacgctggccgagctgtaccccggccgcattgacctgggcctgggccgggcgcccggcaccgacccggtgaccatgcgcgcgctgcgccgcgaccgcgtggagacggaagaagactttccgcgcgacgtggccgagctgcagcgcctgctggcccccgcccagcccggccagcggctcattgccacgcccggagcgggcaccaacgtgcccatctggttgctcggctccagcctgttttcggcccagctggccgcgcagcagggcctgccctacgcttttgcctcgcactttgcgccgcgcatgctgcaccaggccatcggcctgtaccgcaacctgtaccggccgtcggccgcctggcccaagccctatgtggtggtcggcgtgccgctgattgccgcgcccaccgacgacgaggccgagtttctggccagcagcacctaccagcgggtgctgggcatcctgaccggcgaccgccgctgcctgctgccgccagtcgacaactttgccgcaggcctgcagccgcaggagcgcgccgccattgacgactttctggccgccgcagtcatcggcgggcccgacaccgtgcgcgcgggcctccaacacctggccgacgccaccggtgccgacgaactgatactggtgtgcgatgtgtacgacccggcgctgcgcctgcgctcgctcgatatcgcggcnnnnnnnnnnnnnnnnnncctggcgcccggcgcgccttga

SEQ ID NO: 2 - protein, 392 aa, Unknown
  From metagenomic library of CO182/CO183
  misc_feature (381)..(386): Xaa can be any naturally occurring amino acid
MNEADTATPRAGVTIDDLFKTFCVRKSVLATYELPPGHLCDTPGDPSSRDNAPMNPPKPPALSMLDLVAVREGGTVADALAIALRTAQHAESLGFQRYWLAEHHNMQGIASSATAVLVGHIAGGTQRMRVGSGGVMLPNHAPLVVAEAFGTLAELYPGRIDLGLGRAPGTDPVTMRALRRDRVETEEDFPRDVAELQRLLAPAQPGQRLIATPGAGTNVPIWLLGSSLFSAQLAAQQGLPYAFASHFAPRMLHQAIGLYRNLYRPSAAWPKPYVVVGVPLIAAPTDDEAEFLASSTYQRVLGILTGDRRCLLPPVDNFAAGLQPQERAAIDDFLAAAVIGGPDTVRAGLQHLADATGADELILVCDVYDPALRLRSLDIAXXXXXXLAPGAP

SEQ ID NO: 3 - DNA, 1053 bp, Unknown
  From metagenomic library of CO182/CO183
atggcacgaccccccacttcgcgcggcacggcgaccccatcgccgtctgccgcaccttcttccacccaggcggaaacctaccgcggcaacgcaggcgaactgcagcagcaagccgggggcaagcacccggtgccgccccagtgcccgttccacaacctgcagcgcgacggccccatgcagatgcaggtgcccaagggccgcgtgaactacgagcccagcagcctgcaaagcgactcgccacgcgcatcgcaggcgcagggctttcggcattttgcgcaggccgacgatggcgtgaagggccgcgtgcgccccgagagctttgccgaccactacagccaggcgcgcatgttctttcgcagccagagcccgctggagcaggcgcacatggcatccgcactggtgttcgagctgtccaaggtgggcacgccgcatgtacgcgaggcggtggtgggacacctgcagcacgtagaccccgaactggcccagcgtgtggccgacggcctgggcctgcaggccctgccgcccgcaccgcaaaccgcagagcccgtgcaggatctggcgctctctccggcactgcgcatcatcgaccgcatgaagcccacgctgcaggggcgctgcgtgggcattctggtagccgatggctccaacggcacctcggtggccgccctgcgcaaggcactggagaaggtgggtgcctcggtcaagatcgtgtcacccaaagtggggggagccgtgctcaaggacggcacgctgttgcctgccgacggccagctggcgggcactccgtcggtggtgtttgacgccgtggcctcggtgctgtcgcccgagatgggcgcccggctggccaaggaagccgccgccgtggactggttccgcgatgcatttggccacctcaaggccattgccgcctgcaagggcacccaggccatcctgcaggctggcggcattgcgcccgacgccggcgtggtggacccggccgatgtgcaaggcttccttgccgccgcccagacccgtcagtgggagcgcgaaccccaggtgcgcacgctggcctga

SEQ ID NO: 4 - protein, 350 aa, Unknown
  From metagenomic library of CO182/CO183
MARPPTSRGTATPSPSAAPSSTQAETYRGNAGELQQQAGGKHPVPPQCPFHNLQRDGPMQMQVPKGRVNYEPSSLQSDSPRASQAQGFRHFAQADDGVKGRVRPESFADHYSQARMFFRSQSPLEQAHMASALVFELSKVGTPHVREAVVGHLQHVDPELAQRVADGLGLQALPPAPQTAEPVQDLALSPALRIIDRMKPTLQGRCVGILVADGSNGTSVAALRKALEKVGASVKIVSPKVGGAVLKDGTLLPADGQLAGTPSVVFDAVASVLSPEMGARLAKEAAAVDWFRDAFGHLKAIAACKGTQAILQAGGIAPDAGVVDPADVQGFLAAAQTRQWEREPQVRTLA

SEQ ID NO: 5 - DNA, 2505 bp, Unknown
  From metagenomic library of CO182/CO183
gtgaacgcacagaaatggttgttggccgccagcctgtcgctggtggcatggggcgcgcaggcctttcagatcaccagtctttcgccccagggcgaggtggctcgcgtgcgccaggtggtggcgaagttcgacagcgcagccgtccggttcggcgaccccaaggcaccggcccctctcagcctgagctgcagtgatgcgcaggccagcaaaggtgcgggccgctggaccagcgagcgcgagtgggtgtttgatttcgaaaacgacctgccgcccggcgtgcgttgcacggtggtcatccaacctgaattcaaatcggcctctggcgcccttttgacgggcgccagaagctatcaattcaatagcggtgggccgttcatccagagcctgcggcccggccagtatgagcctattgacgaggagcagttcttcgtgctccagctcaatggcccggccactgtggccagcgtgcagcagcacgcctggtgcgtggccgaaggggtgggcgagcgcattccggtgcgcctgatcgacggcaaggagcgcgccgagctgctcaaggcccaggggctgcagaagcgcgccgaacgggagccgctgtccgtcgtcacattggcgtgcaaccggcgcctcacgccctcggccagggtgcaactggtctggggcaagggcgtggcaacgcccagcggggtggtgggcacggtcgagcggcgctacagctaccaggtgcgtgcaccgtttgccgccgaattcagttgcgagcgcgagaacgcccaggccgcgtgcctgcccatccggccgatgcagctctccttcaacgcaccggtgccgcgcaagctggcggcggccattcgcctcaagggcccgcaggaatcggtggcgccccggttcgatggcgacggtgcggccgcgcagcccgacgccctggtcagcagtgtgcagtttgccgcgcctctgaccgagaacacatctttccaggtggagctgcccaagggcttcaaggacgctgcgggccgcgatctggccaacgccgacagctttcccctgaaggtggccacgggcggcatgccgccgctggccaagttcgccgccgcgccgttcggcatcgtcgagcgcttcgccgaaggcaaggaggccccggcgctgctgcccgtgacgctgcgcaacgtcgaggccgacctgcgcgtgcagggcctgcaggtcggcagcggcggggtgcctgcgggcaaggtcagcacactgcgcccgcaggaggacgccgagatcattgcctggttccgcaaactgcagcagtacgacagcacccaggtggagcgctcgaaggcgcggcgcgatgtcaaaggcccgctgcccaaggtgatcgacagcgacaaggagtatgtgcaatcgcgcatgctctctctgctcggtggccagagcggcgtgcgcacgctcgacctgccccggcctgccagcgccgacccgcgcccgttcgaggtggtgggcattccgctgggtgccggtttccatgtggtggagatcgcctcgcccctgctcggcgccgcactgctcgatgcgcgtcacggcgccgcgcggaccatgtttgtgcgcacctcggcgctggtgaccaacctgggcgtgcacttcaagctcgggcgcgagaacgcgctggcctgggtgaccacgctcgaccggggcctgcccgtggcgggcgcgcgcgtgcgcgtatccgactgccacggtcgcgaactggccaccggcaccaccgacgcccagggcgtggcgcgcatcgagggcctgtcgtccgacccgccgctgtgcaatggcccgggcgagggcggcaacgcgtatttcgtcagcgcacgccaccaggggccggacggcgtgcaggacatggcattcacctggagcgactggcagcgcggcatcgagccctggcgcttcaacgtgcccaccagcaacgacccgcgccccgacgagcgcgcgcacaccatcttcgaccgcaccctgctgcgggccggagaaaccgtatcgatgaagcacctgctgcgcagcgagacgcgcggaggttttggcgtgcccgaggcggcgcccgacaccctggccatcacccatctcggtagcggccagcaattcacgcaagcgctggtctggcgcaaaacggccacgggcgggcgcagcgcgcacagcagctttgccgtgccgccggccgccaagctgggcgtgtacgaagtggagctgcgcggcagccggggcgagggctacagcctgatcacgggccagttccgcgtcgaggaattccgcctgcccgtgctggagggccgtgtcggcccggctgacaaggcgccgctggtcaatgtgcgctcggtgccggtgggcgtgcaggtgaattacgtggcgggcggcgcagcggcgcaattgccggtgcgcgtgtcggccctggtgcgcagccgctatcgtgggatccccgggtaccgagctcgaattcgccctatagtgagtcgtattacaattcactggcattattag

SEQ ID NO: 6 - protein, 834 aa, Unknown
  From metagenomic library of CO182/CO183
MNAQKWLLAASLSLVAWGAQAFQITSLSPQGEVARVRQVVAKFDSAAVRFGDPKAPAPLSLSCSDAQASKGAGRWTSEREWVFDFENDLPPGVRCTVVIQPEFKSASGALLTGARSYQFNSGGPFIQSLRPGQYEPIDEEQFFVLQLNGPATVASVQQHAWCVAEGVGERIPVRLIDGKERAELLKAQGLQKRAEREPLSVVTLACNRRLTPSARVQLVWGKGVATPSGVVGTVERRYSYQVRAPFAAEFSCERENAQAACLPIRPMQLSFNAPVPRKLAAAIRLKGPQESVAPRFDGDGAAAQPDALVSSVQFAAPLTENTSFQVELPKGFKDAAGRDLANADSFPLKVATGGMPPLAKFAAAPFGIVERFAEGKEAPALLPVTLRNVEADLRVQGLQVGSGGVPAGKVSTLRPQEDAEIIAWFRKLQQYDSTQVERSKARRDVKGPLPKVIDSDKEYVQSRMLSLLGGQSGVRTLDLPRPASADPRPFEVVGIPLGAGFHVVEIASPLLGAALLDARHGAARTMFVRTSALVTNLGVHFKLGRENALAWVTTLDRGLPVAGARVRVSDCHGRELATGTTDAQGVARIEGLSSDPPLCNGPGEGGNAYFVSARHQGPDGVQDMAFTWSDWQRGIEPWRFNVPTSNDPRPDERAHTIFDRTLLRAGETVSMKHLLRSETRGGFGVPEAAPDTLAITHLGSGQQFTQALVWRKTATGGRSAHSSFAVPPAAKLGVYEVELRGSRGEGYSLITGQFRVEEFRLPVLEGRVGPADKAPLVNVRSVPVGVQVNYVAGGAAAQLPVRVSALVRSRYRGIPGYRARIRPIVSRITIHWHY

SEQ ID NO: 7 - DNA, 459 bp, Unknown
  From metagenomic library of CO182/CO183
atgtccagaacactgactaccgcggcgctcgccgccctgctgctaagtggcgccgcccaggccgcgcaacccctgatcattgatgtgcaccgcgacgccaactgtgggtgctgcaaggactggattacctacctggagaacaacggcttcgaagtccgcgatcacgtcgaacgcaacatgaacacggtcaagcaagacctcggcgtgaaaccgcgtctggcttcctgccatacaggcgtgatcgatggaaagttcgttgaaggccacgtgcccgttgcgcagattttggagcttcgcaagcgccctgacctgctgggcatcgccgtgccaggcatgccggctggctcaccaggcatggagtatggcgacgtcaaacatccctaccaggtgatcgggataactcgcactggccgagaaaaggtcattgccaattatccgctggaacaagccccgaattaa

SEQ ID NO: 8 - protein, 152 aa, Unknown
  From metagenomic library of CO182/CO183
MSRTLTTAALAALLLSGAAQAAQPLIIDVHRDANCGCCKDWITYLENNGFEVRDHVERNMNTVKQDLGVKPRLASCHTGVIDGKFVEGHVPVAQILELRKRPDLLGIAVPGMPAGSPGMEYGDVKHPYQVIGITRTGREKVIANYPLEQAPN

SEQ ID NO: 9 - DNA, 273 bp, Unknown
  From metagenomic library of CO182/CO183
atgagcaccgttgaattgagtgtcaaaggcatgagctgcggctcatgcgtcctgcatgtcaccgaggcgctcaacgcagttgaaggcgtcaccgaggtcgacgtcgatctgcaagcggccagtgtgcgggtcagcgctgagtgcgacagcgatgtgcttgtcgccgccctaggtgatgctggataccccgcccaactgagcagtccggcggcctcatcgagccccgccaggaaaaccggatgcggtggcagcggtggctgctgttgcaagtga

SEQ ID NO: 10 - protein, 90 aa, Unknown
  From metagenomic library of CO182/CO183
MSTVELSVKGMSCGSCVLHVTEALNAVEGVTEVDVDLQAASVRVSAECDSDVLVAALGDAGYPAQLSSPAASSSPARKTGCGGSGGCCCK

SEQ ID NO: 11 - DNA, 378 bp, Unknown
  From metagenomic library of CO182/CO183
atgagcgataacgtctttgcgcttgagacgattgaagtaaaggcaggtgagactgtccgttttgtgttgcataacgatggagccctgcttcatgaattcaacctcggctactcggccacccatgccgcgcacgagcaagaaatgattgcgatgtttcgcagcggcatgcttaccccgactggtgctcatgatatgagccatatggaaggtgaaatggatggcgggatgacacacgatgatccgaacagtgttctgatcgaacccggcgcccgcgaagagttgatctggacgttctcgaaaaccaagaatctggagtttgcttgcaatattccgggacactatcaagcgggaatggtcggcaaggtagagatacgttaa

SEQ ID NO: 12 - protein, 125 aa, Unknown
  From metagenomic library of CO182/CO183
MSDNVFALETIEVKAGETVRFVLHNDGALLHEFNLGYSATHAAHEQEMIAMFRSGMLTPTGAHDMSHMEGEMDGGMTHDDPNSVLIEPGAREELIWTFSKTKNLEFACNIPGHYQAGMVGKVEIR

SEQ ID NO: 13 - DNA, 1701 bp, Unknown
  From metagenomic library of CO182/CO183
atgcatagaaaacccacaaggcgaactttcatcaaagggttagccgcaactggaatacttggtggcctgggcatgtggcgcgtgccggtttgggcggtcactagcccaggacaagctaacgtgctgaccggtaacgactttgatctgttcattggtgagattccagtaaacataacgggcgcggcccgcaccgcaatgactatcaatggttcacttccagggccgatcctgcgctggcgggaaggagatacggtcactcttcgggttcgcaatcgtttgcatgaggatacgtccattcactggcacggcattatcctgccggccaacatggacggtgtgcctggcttgagcttccatggcatcgctccggacggcatgtacgagtacaaatttgatgtcaaccagaatggtacctattggtaccacagccattcgggcctccaagagcaggccggagtctatggtgccttggtgatcgatgcgaaagatcccgaacctttcagctacgatcgtgactacgtggtgctgttgagcgactggaccgacgagaatccggatcgggtcctggcaaagttgaagaagcaatcggactattacaactatcacaaacgcaccgtcggtgacttcattgatgacgtgagcgagatgggatggtccgctgctattgccgaccgcaagatgtgggccgagatgaagatgagccctacggatctcgccgacgtcagtggctacacatacacctacctcatgaacggccaggcgccggacggcaactggacgggcatcttcaagccgggcgaaaaaattcggctgcgtttcattaatgctgcagccatgacctacttcgatgttcgtattcctggtctgaagatgacggtggttgcggctgatggacagtacgtcaaaccggtcagtgtcgatgagttccgcatcgccgtggccgaaacctacgacgtcatcgtcgaacccgaaaacgagcaggcttacaccatcttcgcgcaatccatggatcgtaccggctattccaggggcaccttggcggttcgcgaagggctgagcgcgcctgtcccagaggtcgaccctcgtccgcttatctcaatggccgacatgggcatggatcacggcagcatggatggcatggagcatggctctatgcagagcgggatggcctctatggccggtatggatcacagcaagatggcaggcatggaccacagccaaatggcaggcatgagccatggcagcatgtccggtatggatcacagccaaatggcggggatggaccatggcacgatgcagtcgcacccggcttccgaaaccaataaccctttagttgacatgcagaccatgacgccggcgccaaatctgagcgacccgggaatcggcctgcgtgacaacgggcgtcaagtcctcacttactctgatcttcgcagcaccttcctcgatccggacggccgcgatccgagccgcaccattgaactgcacctcaccgggcacatggagaagttttcttggtcgttcgacggtatcaagttctctgatgctgaaccgctgcgactcaagtatggcgagcgtgttcgtatcactttggtcaacgacacgatgatgacccacccaattcacctgcatggcatgtggagtgatcttgaagacgagaacggcaactttctggtgcgcaaacacaccagtgggatcctctag

SEQ ID NO: 14 - protein, 566 aa, Unknown
  From metagenomic library of CO182/CO183
MHRKPTRRTFIKGLAATGILGGLGMWRVPVWAVTSPGQANVLTGNDFDLFIGEIPVNITGAARTAMTINGSLPGPILRWREGDTVTLRVRNRLHEDTSIHWHGIILPANMDGVPGLSFHGIAPDGMYEYKFDVNQNGTYWYHSHSGLQEQAGVYGALVIDAKDPEPFSYDRDYVVLLSDWTDENPDRVLAKLKKQSDYYNYHKRTVGDFIDDVSEMGWSAAIADRKMWAEMKMSPTDLADVSGYTYTYLMNGQAPDGNWTGIFKPGEKIRLRFINAAAMTYFDVRIPGLKMTVVAADGQYVKPVSVDEFRIAVAETYDVIVEPENEQAYTIFAQSMDRTGYSRGTLAVREGLSAPVPEVDPRPLISMADMGMDHGSMDGMEHGSMQSGMASMAGMDHSKMAGMDHSQMAGMSHGSMSGMDHSQMAGMDHGTMQSHPASETNNPLVDMQTMTPAPNLSDPGIGLRDNGRQVLTYSDLRSTFLDPDGRDPSRTIELHLTGHMEKFSWSFDGIKFSDAEPLRLKYGERVRITLVNDTMMTHPIHLHGMWSDLEDENGNFLVRKHTSGIL

SEQ ID NO: 15 - DNA, 1641 bp, Unknown
  From metagenomic library of CO182/CO183
atgctatatttccgcacttctctcgagtcgggtgacatcttgctcaaacagtacgacgtactcattcttggcagcggcaccgccggccagtccatcgccctgcgcctcgccgacaccctgcgagttgcgctcgtcaccaagcgcgagctctccgacagcgcgagcaactgggcccagggaggaatcgctgcggttctcgacaccaccgacagcatcgaagcgcacatccaggacaccttcactgccggtgccgggctgtgcgatccgggcgcgacccgtttcgtggtcgaaaatggcaagcgcgcgatcgactggctgatcgagcgcggcgtgcccttcacccgcgaacccgactcggaattcggctaccacctgacccgcgagggcgggcactcccaccgccgcgtcatccatgccgccgacgccaccggcgccgcagtgcagctgacactgagcgcccaggtgcgcgcccaccccaacatcgacatctacgagcatcacatcgccgtcgatctggtgctcggcgacaaggtcggacagccgggcgagggctgcctcggcgcctacgtcctcgacatcgccgcagacgaggtcgtcaccttcagcgcccgcaatacggtgctcgccaccggaggcaccggcaaggtctatctgtatacgaccaacccggacgtggccaccggcgacggcgtggccatggcctggcgtgccggctgccgggtggggaacatggaattcatccagttccatccgacctgcctgtaccaccctcaggccaagtccttcctgatctccgaggccgtgcgcggcgaaggcggcctgctgaagctgcccgacggcacccgcttcatgcccgagcacgatccccgcgccgagctcgcgccgcgcgacgtcgtcgcccgcgcgatcgacttcgagatgaaaaagcgcggcatcgactgcgtctacctcgatatcagccacaagcccgaagcctggctgcgcgagcacttccccaacatccacgcgcgctgcctggaactgggcatcgacatcagccgcgagccgatcccggtcgtgccctgcgtgcacttctcctgcggcggcatcgtcaccgacctgtccgcccgcaccgacgttcccggcctgtacgccgtcggagaatccgcattcaccggcctgcatggcgccaaccgcctggcaagcaactccctgctcgaatgcctggtgttcggcgaggccgccgccggggacatcctcgccaagcctcacgtgctgccgccggcgttacccgactgggacgagagccgcgtcaccgacgccgacgaggaagtggtgatcgcgcacaactgggcggaactgcgccgcgccatgtgggactacgtcggcatcgtgcgcacgaccaagcgcctcaagcgcgcccagcaccgcatccgcctgctcgagcgcgagatccacgagttctataccaacttccgcgtcagcaacgacctgatcgaactgcgcaacctggtcacgaccgccgacctgatcgtgcgctgcgcgctgcggcgcaaggaaagccgtggcctgcacacctcgcgcgacttccccggcatgctggcgcgcgcgcgcaacaccgtcctgcgtccgcggctagcacgaaagaaagcgggaagctga

SEQ ID NO: 16 - protein, 546 aa, Unknown
  From metagenomic library of CO182/CO183
MLYFRTSLESGDILLKQYDVLILGSGTAGQSIALRLADTLRVALVTKRELSDSASNWAQGGIAAVLDTTDSIEAHIQDTFTAGAGLCDPGATRFVVENGKRAIDWLIERGVPFTREPDSEFGYHLTREGGHSHRRVIHAADATGAAVQLTLSAQVRAHPNIDIYEHHIAVDLVLGDKVGQPGEGCLGAYVLDIAADEVVTFSARNTVLATGGTGKVYLYTTNPDVATGDGVAMAWRAGCRVGNMEFIQFHPTCLYHPQAKSFLISEAVRGEGGLLKLPDGTRFMPEHDPRAELAPRDVVARAIDFEMKKRGIDCVYLDISHKPEAWLREHFPNIHARCLELGIDISREPIPVVPCVHFSCGGIVTDLSARTDVPGLYAVGESAFTGLHGANRLASNSLLECLVFGEAAAGDILAKPHVLPPALPDWDESRVTDADEEVVIAHNWAELRRAMWDYVGIVRTTKRLKRAQHRIRLLEREIHEFYTNFRVSNDLIELRNLVTTADLIVRCALRRKESRGLHTSRDFPGMLARARNTVLRPRLARKKAGS

SEQ ID NO: 17 - DNA, 510 bp, Unknown
  From metagenomic library of CO182/CO183
atgcatcggccgctgagcatcgaactctctccttcgcgaggggtgctggcgtcagtgctggccgtgcatgtcgcggctgcactggcgctttttcatgccctgttcccgatgccgacgggaggtcccgaggggcaggtggccctggccgcagtggcctgggggctgctcatcgcctccttgctgcgcgccatccgcgccgaactgggcaagcgcgggaccacgctggtgctgctcgaggacggggcggtggaggtgtcgagtggcggggagcgggggctgtgccgagtcggtgccgatgccgtcgatctcggctgggcgctgtggctcgatcttcgacccggcccggcggcggacgcgggcgacggcatgccactgccgccccggcacgggcggggcgtggagcgcgggaggcgactgatgcttctgcccgtgaacctgccggctgcgcagtggcgggggctgcggatctggctgcgccaccaggcgctgcgcggcgacgccggtgtctga

SEQ ID NO: 18 - protein, 169 aa, Unknown
  From metagenomic library of CO182/CO183
MHRPLSIELSPSRGVLASVLAVHVAAALALFHALFPMPTGGPEGQVALAAVAWGLLIASLLRAIRAELGKRGTTLVLLEDGAVEVSSGGERGLCRVGADAVDLGWALWLDLRPGPAADAGDGMPLPPRHGRGVERGRRLMLLPVNLPAAQWRGLRIWLRHQALRGDAGV

SEQ ID NO: 19 - DNA, 1236 bp, Unknown
  From metagenomic library of CO182/CO183
gtgtcgcgtcgtagagtcgtcgtcaccggtctaggcgtgatctcgccggtcggcaatactgttcccgaggcctgggaaaacctgactgccggcaagagcggtgtcggcccgatcacgcgtttcgatgccagcagtttcgcgtcgcgcatcgcgggtgaagtgaaggacttcgacgtcgccgcctatctttcccccaaggaggcacgccggatggatgtcttcatccattacggcatggctgcggggatccaggcgatccgcgattcaggcatcgaggtcgacgagtccaacgccgatcgcatcggtgtcaacatcggttcgggcatcggcggcctgccgatgatcgaggatacccacaacgatttcctcggcggcggtccgcgcaagatttcccccttcttcattcccggcacgatcatcaacatgatctcggggaacctctcgatcctgttcggcctgaaggggccgaaccttgcggtggtgaccgcatgcaccaccgggcttcatgcaatcggaatgggtgcgcggatgatcgaatacggcgatgccgacgtgatggtgtgcggcggcgcggaatccaccgtcaccgaactggcgatcggcggcttcgcctcggccaaggccttgtccacgcgcaatgatgatcctgccaccgccagccgtccctgggacaaggggcgcgacggtttcgtgctgggcgaaggcgccggcgtgctggtgctcgaggagtacgagcatgcaatcaagcgcggggcgaaaatctacgcggaagttgccggtttcggcatgagtggcgatgccttccacatgactgcgccggacaccgatggcccgcgccgcagcatgatcaacgcgatgcggaatgccggggtcaatccagacgaagtggactatctcaacgcccatggcacctcgacgccgctcggcgacaagaacgagaccgatgcgatcaagctcgcgttcggcgcggatgtggcgaagaagctcgtggtcaactcgaccaaatcgatgaccggccaccttctcggtggggccggcggcctggaatcggtgtttaccgtcctggcggtgcatcaccagatttcgccgccgacgatcaacctcttcgaccaggacccggagtgcgatctcgattactgtgccaacgtcgcgcggcagatgaagatcgacgtcgccctgaagaacaacttcggcttcggcggcaccaacgggacactcgtcttccgccgcgtctga

SEQ ID NO: 20 - protein, 411 aa, Unknown
  From metagenomic library of CO182/CO183
MSRRRVVVTGLGVISPVGNTVPEAWENLTAGKSGVGPITRFDASSFASRIAGEVKDFDVAAYLSPKEARRMDVFIHYGMAAGIQAIRDSGIEVDESNADRIGVNIGSGIGGLPMIEDTHNDFLGGGPRKISPFFIPGTIINMISGNLSILFGLKGPNLAVVTACTTGLHAIGMGARMIEYGDADVMVCGGAESTVTELAIGGFASAKALSTRNDDPATASRPWDKGRDGFVLGEGAGVLVLEEYEHAIKRGAKIYAEVAGFGMSGDAFHMTAPDTDGPRRSMINAMRNAGVNPDEVDYLNAHGTSTPLGDKNETDAIKLAFGADVAKKLVVNSTKSMTGHLLGGAGGLESVFTVLAVHHQISPPTINLFDQDPECDLDYCANVARQMKIDVALKNNFGFGGTNGTLVFRRV

SEQ ID NO: 21 - DNA, 525 bp, Unknown
  From metagenomic library of CO182
atgtcgcaacaaggcatcccgtcgagagtcatctccgaccctttcaggtttgccgcagaggcgcgctcgattcagggcgaggtcgctgtggcggatttgctgcgcttgagcgatgtccttgcctcgaccgaaggcgtggtgcgctggaagctggaaggttcgctggtcggggaagtggcccggggagagccgcgcttgcgcctgaccgcgagcgggcagctcgatctgtattgccagcgctgtctgggcggccttgcgtgggtgctcaagctcgatacgcagttgcaactggtcagggctgggcagccgatcccggaagaagagcttgaaaacgacgagttcgatgcgatcgaagtcggtgacgagttcgatgcgctggcgcttctcgaagacgagatcctgctggcgctgccggtcgcgccgcggcacgaaaattgtgatgccccccgcccggtggggggggcgtcgaaagaatcgcctttcgctgcgctggcgtcgctgcgaggcagtcccagcgcgaaatag

SEQ ID NO: 22 - protein, 174 aa, Unknown
  From metagenomic library of CO182
MSQQGIPSRVISDPFRFAAEARSIQGEVAVADLLRLSDVLASTEGVVRWKLEGSLVGEVARGEPRLRLTASGQLDLYCQRCLGGLAWVLKLDTQLQLVRAGQPIPEEELENDEFDAIEVGDEFDALALLEDEILLALPVAPRHENCDAPRPVGGASKESPFAALASLRGSPSAK

SEQ ID NO: 23 - DNA, 963 bp, Unknown
  From metagenomic library of CO182
atgaaggcattgcaaggtatcgaggggcatctggagtgggccgaacgaccggctccggcgtgcggtgaaggcgaagtccgtatccgcgtcgctgccgctgggctgaaccgcgcggacctgctgcaacgcgctgggcattatccgccgccagcaggtgttaccgacatcctgggcctggagtgtgcgggtgtgattgctgaagtaaacgggcgcagccgctggaaggtcggcgatcgcgtgtgcacgctgctggctggcggtggcatggctgaagaggtggtagtcgatgcgcgccacgcactgccggttcccgatggcatgacgctgcacgaagcggcggtgattcccgaggtatacgccacggcctggctgaatctctatcggcttggcgcgctgctggccggtgacaaggtgctcttgcatgctggcgcgagtggcgtcggttcggcggcgatccagctgtgcaaggcgttcggcaatccgtgctgggtcagtgtcggctcggctgagcgtctggcgtactgcgaatcgctgggtgctcagggtggcgtgctgcgtggcgactcgcttgaagcgctgcgcgatttcggcccgttcgacatgatcctcgatcccgtgggcgccaagtacgccgcgcttaacatgcagctgttggggatggacgggcgctgggtgatgatcggccttatgggtggacgcaaggccgagatggatcttgccgggctgctggccaagcgcatccagttgattggttcgaccttgcgcagccgggatgccgactacaaagcggggctgctggcagaaatggaggagaaagtctggccgctgtttgcccagggcaagctttcgccgcgtctggagcaaaccttcgccattggagacgcagaggcggcattcgccgcgctcgccagcaacaccgtttccgggaaggtggcgctggtgatcgatagcgcactttcctga

SEQ ID NO: 24 - protein, 320 aa, Unknown
  From metagenomic library of CO182
MKALQGIEGHLEWAERPAPACGEGEVRIRVAAAGLNRADLLQRAGHYPPPAGVTDILGLECAGVIAEVNGRSRWKVGDRVCTLLAGGGMAEEVVVDARHALPVPDGMTLHEAAVIPEVYATAWLNLYRLGALLAGDKVLLHAGASGVGSAAIQLCKAFGNPCWVSVGSAERLAYCESLGAQGGVLRGDSLEALRDFGPFDMILDPVGAKYAALNMQLLGMDGRWVMIGLMGGRKAEMDLAGLLAKRIQLIGSTLRSRDADYKAGLLAEMEEKVWPLFAQGKLSPRLEQTFAIGDAEAAFAALASNTVSGKVALVIDSALS

SEQ ID NO: 25 - DNA, 1395 bp, Unknown
  From metagenomic library of CO182
atgaccgctgaaacgctgcacaccggatcgctccagcgcggtctgaagaatcgccacatccaattgatcgctctgggcggggcgattggcactgggctattcctgggctcggccggggttctgagaagtgccggcccgtcaatgatcctgggctacgcgattggtggcttcatagcttttctgatcatgcgtcagctcggcgaaatgatcgtcgaggagccggttgcaggctccttcagccatttcgcacacaagtatggcggtggctatgcagggtttctttccggctggaactattgggtgctctatgtcctggtaggtatggccgagctcacggcggtcggcaagtacgtacagttctggtggcccgaggttccgacctgggctacagccgcagcgttcttcgtgctgatcaacttgatcaacctcagtaacgtcaaggccttcggcgaaaccgagttctggtttgccatcgtcaaggtcgccgcgatcgtcggcatgatcctgctcgggcttttcctgctggtcagcggtaagggcggcgagcaggcgagcatcagcaatctgtggagccacggtgggttttttcctaacggcttcagcgggatgctgctggctttggcgatcatcatgttttcctttggtgggctggagctggtgggtatcaccgcggcggaagcggctgagccgaaaaccgtgattcccaaggcaatcaatcaggtcgtctatcgcatcctgattttctatataggtgcgctgaccgttctgctggcactttatccctgggatgcgttgctgcggacgctgggtgccgcgggcgacccctacagcggcagcccgttcgtgcagatcttttcgctgatcggcagcgacactgctgcgcacctgctgaatttcgtcgtgctcaccgcggcgctatcggtctacaacagcggtgtgtattgcaacagccggatgctgtacggcctggccgaacaaggcgatgcgccgcgcagcctcatgaaaataaactctcgcggcgtgccggtcctcgcggtaggggtatccgcgttggtgacgctgctttgcgtggcggtgaactacctgtttccgcagggcgcgctcgagttactcatgtctctcgcggtggctgcgttggtgatcaactgggcgatgatcagtcttgcgcatctcaagtttcgacgtgccatgcagcagcaaggggtcgaaccaagcttcaaggcgttctggtttccactgagcaactacctgtgcctggccttcgttgccggcatattgatcatcatgctgtggttgccagggattcgcatgtcggtattcgccattcccgtctgggttggctttctctggctgtgctatcggctgcgggctcgtttactggcgagggcgctatag

SEQ ID NO: 26 - protein, 464 aa, Unknown
  From metagenomic library of CO182
MTAETLHTGSLQRGLKNRHIQLIALGGAIGTGLFLGSAGVLRSAGPSMILGYAIGGFIAFLIMRQLGEMIVEEPVAGSFSHFAHKYGGGYAGFLSGWNYWVLYVLVGMAELTAVGKYVQFWWPEVPTWATAAAFFVLINLINLSNVKAFGETEFWFAIVKVAAIVGMILLGLFLLVSGKGGEQASISNLWSHGGFFPNGFSGMLLALAIIMFSFGGLELVGITAAEAAEPKTVIPKAINQVVYRILIFYIGALTVLLALYPWDALLRTLGAAGDPYSGSPFVQIFSLIGSDTAAHLLNFVVLTAALSVYNSGVYCNSRMLYGLAEQGDAPRSLMKINSRGVPVLAVGVSALVTLLCVAVNYLFPQGALELLMSLAVAALVINWAMISLAHLKFRRAMQQQGVEPSFKAFWFPLSNYLCLAFVAGILIIMLWLPGIRMSVFAIPVWVGFLWLCYRLRARLLARAL

SEQ ID NO: 27 - DNA, 786 bp, Unknown
  From metagenomic library of CO182
atgctggtagattcccactgtcacctcgaccgcctcgacctcactgcccacgacggctcactggacgccgcgctggacgctgcacgatcgcgtggtgtcgggcatttcctctgcataggtgtcagcgccgataacgcagcggcggtcagagcgttggccgagcgctatgcggatgtggactgctcgatcggcgtgcatcctctggatctcgagccgacgagccagccggtgctggactggttgcttggcgagctgcagcacccgcatgtggttgcgatcggcgagacagggctggattaccactacgagccggaagctgcgcagatgcagcagcagtcgtttcgcctgcaccttgaagccgccaggctgacaggtaagccggtgattgtgcacacccgggcagcccgcgccgatacgctggatctgctacgtgaagcggcgctgccgcaagctggtgtgctgcattgtttcaccgaggactgggacatggccaaggcggcacttgatctcggtttctatatttccctgtccgggatcgttacgttccgcaacgccgatgcgctgcgcgatgtagcccgcaaggtcccggcagatcgcttgctggtcgaaaccgatgcgccttatctggcgccgattccccaccgtggcaaagccaatctgccgcagtacgtgcgtgaggttgccgagttcctcgcgcagctgcgtggtgtcccgttcgaagtgctggctgagcagaccactgccaacttcaagacgttgttcccgctggccagagtgactggctga

SEQ ID NO: 28 - protein, 261 aa, Unknown
  From metagenomic library of CO182
MLVDSHCHLDRLDLTAHDGSLDAALDAARSRGVGHFLCIGVSADNAAAVRALAERYADVDCSIGVHPLDLEPTSQPVLDWLLGELQHPHVVAIGETGLDYHYEPEAAQMQQQSFRLHLEAARLTGKPVIVHTRAARADTLDLLREAALPQAGVLHCFTEDWDMAKAALDLGFYISLSGIVTFRNADALRDVARKVPADRLLVETDAPYLAPIPHRGKANLPQYVREVAEFLAQLRGVPFEVLAEQTTANFKTLFPLARVTG

SEQ ID NO: 29 - DNA, 1284 bp, Unknown
  From metagenomic library of CO182
atggcgcacactccttatcccagctcttattacgctttctccgctaatccggtgccagagcgcccggctctggcgggcgaagtggaaaccgatgtctgcgtgattggcgccggttataccggactctccactgcacttttcctgctggagaacggcttcaaggtctccatcgtcgaagcggctaaggtcggtttcggcgcgtcaggccgcaacggcggccagatcgtcaacagctatagccgtgacatcgacgtaatcgagcgtactgtcggcccgaaacaagcccaactgatgggtcagatggccttcgaaggcggccgcatcatccgcgagcgcatcgccaagtacgacatcaagtgcgacctgaaggatggcggcgtcttcgctgcattcaccaagaagcagatgaagcacctcgaagcgcagaagcaactgtgggagcgctacggccacacccagctggaaatcatggacgccaagcgcatccgtgaggtggtcaagaccgaaaactacatcggcggcatgctcgatatgagtggcggccacattcacccgctgaacctcgccctcggcgaagccgcagcggtggagagcctgggtggcatcatttatgaacagagcccggcggtgcgtatcgagcgcggcgctaacccggttgtgcacaccccgcagggccgcgtgaaggccaagttcatcgtggtcgccggcaacgcctatctcggcaacctggtgccggaactggccgccaagaccatgccgtgcggcagccaggtagtcgccaccgagccactgagcgaagaagtggccaagagcctgctgcccaatgactactgtgtggaagactgcaactacctgctggactacttccgcctgactggcgaccgtcgcctgatctacggcggcggcgtggtctacggcgccaaggacccggccaacatcgaggcaatgatccgcccgatgatgctcaagaccttcccgcagctcaaagatgtgaagatcgatttcgcctggaccggcaacttcctgctgaccctgtcgcgcctgccccaggtcggccgcatcggcgacaacatctactactcccagggctgcagcggtcacggcgtgacctacacccacctggccggcaagatcctcgccgaggccctgcgcggtcaggccgagcgcttcgatgccttcggcagcctgccgcactacccgttcccgggtggtcgtctgttccgcgtacccttcaccgccatgggtgcctggtactacagcctgtgtgacaagctgggtatctga

SEQ ID NO: 30 - protein, 427 aa, Unknown
  From metagenomic library of CO182
MAHTPYPSSYYAFSANPVPERPALAGEVETDVCVIGAGYTGLSTALFLLENGFKVSIVEAAKVGFGASGRNGGQIVNSYSRDIDVIERTVGPKQAQLMGQMAFEGGRIIRERIAKYDIKCDLKDGGVFAAFTKKQMKHLEAQKQLWERYGHTQLEIMDAKRIREVVKTENYIGGMLDMSGGHIHPLNLALGEAAAVESLGGIIYEQSPAVRIERGANPVVHTPQGRVKAKFIVVAGNAYLGNLVPELAAKTMPCGSQVVATEPLSEEVAKSLLPNDYCVEDCNYLLDYFRLTGDRRLIYGGGVVYGAKDPANIEAMIRPMMLKTFPQLKDVKIDFAWTGNFLLTLSRLPQVGRIGDNIYYSQGCSGHGVTYTHLAGKILAEALRGQAERFDAFGSLPHYPFPGGRLFRVPFTAMGAWYYSLCDKLGI

SEQ ID NO: 31 - DNA, 180 bp, Unknown
  From metagenomic library of CO182
atgaatggcttcgccaacgtgcagccatatatgtgggaggctttacgcatgctggagcgcggcatagtcgatccgcagaattacttttctcacactttcgccctgagtgacgtggataaagccttcgccacattcaataacaaatctgatagtgcaatgaaaatgctcatcaagccgtaa

SEQ ID NO: 32 - protein, 59 aa, Unknown
  From metagenomic library of CO182
MNGFANVQPYMWEALRMLERGIVDPQNYFSHTFALSDVDKAFATFNNKSDSAMKMLIKP

SEQ ID NO: 33 - DNA, 1365 bp, Unknown
  From metagenomic library of CO182
atgaaaaaattccgtacgatttcagctgtaatcctcgctatcagttcacccatagttcaggccaccgaagttttccgattggagggcttcggagcaatctcccgtgccatgggcggaaccgcaacagcattcgatgttggcgcagcgggcatgatgagcaatcccgcaacactgtcgttaatggcccaaggttcagagcttcatttgggtctggatgcagtggttactgacatcgacacaaaaaatctggccacaggagaaaatgcgtcgtccaatacacactccaagaaccgcggcccctatctagcaccccaacttgcttatacttatcacagtggcccccttgcactcggcgtcggtgcctttgcccaaggtggactgggaacggaatatggcaccaacagctttctttcccgtgccacaggaaacttggatacggggctcgaaaactcgagccggctcctcgtcttgaacatccccttcgccgccagttaccaagtcaacgataaactgactgtaggtgccagccttgatgccatgtggcaaggcttgaatctcgaactattactcggtgcagatcaggttggctcgctgatcggcgcgggcagggtcagcggcagccttgtacctgtacttggtggtttacccgatttacgtggtgcgcacttcagcttgagcaaaaaccaaccccttaacagtggtgttgacgcttggggtttgggagggcgtctcgggatgacctacaaagtgtctaataacaccattctgggggccgcttacaccctggaaagccagatgaatgatatgcaaggacgggctacgcttaccgcggttgatggaatcgctggccagatccctctcgatggaaagatcaagttacgtgacttccagatgcccgccaaactagactttggccttagtcatagtttcaacgagcagtggatgtttacggtcgatgtctctcgcgtattctggaagcacgcaatgaaagatatcaatgttggattcacgtcagacaacggagttaacatagacattctgctcccgcaaaactacaaggatcagaacatctttgccattggcctggcctaccaaacaggtaactggacattgcgcagcggtgcgcgtatctctgatcaagcactacgtgccgacacactgtttgctatcattcccgccattccaagaaaacacgtttcggctggtttttcctatgatttttcgagtgcgaatagtgtggattttgcctattcccatgcatttaaagaatcgcttgaaaactcatctctgcccaatacgtcagcccccatacgcagcagccactcacaggacaattttacactagcttatactcacaaattctga

SEQ ID NO: 34 - protein, 454 aa, Unknown
  From metagenomic library of CO182
MKKFRTISAVILAISSPIVQATEVFRLEGFGAISRAMGGTATAFDVGAAGMMSNPATLSLMAQGSELHLGLDAVVTDIDTKNLATGENASSNTHSKNRGPYLAPQLAYTYHSGPLALGVGAFAQGGLGTEYGTNSFLSRATGNLDTGLENSSRLLVLNIPFAASYQVNDKLTVGASLDAMWQGLNLELLLGADQVGSLIGAGRVSGSLVPVLGGLPDLRGAHFSLSKNQPLNSGVDAWGLGGRLGMTYKVSNNTILGAAYTLESQMNDMQGRATLTAVDGIAGQIPLDGKIKLRDFQMPAKLDFGLSHSFNEQWMFTVDVSRVFWKHAMKDINVGFTSDNGVNIDILLPQNYKDQNIFAIGLAYQTGNWTLRSGARISDQALRADTLFAIIPAIPRKHVSAGFSYDFSSANSVDFAYSHAFKESLENSSLPNTSAPIRSSHSQDNFTLAYTHKF

SEQ ID NO: 35 - DNA, 2457 bp, Unknown
  From metagenomic library of CO182
atgtccatgcaccgcttcacccatttcttctacctggccaaactctggctgttccgtaacccgcgccgggtgctggcgctgatcggcgcgctgaccctgttcttcgccgcccagattccggcgctcaaggtctataccgacttcgccgacctgctgccgcagcagcacccgtatatccagctgcacaacagcatcaaggacaccttcggcggcgccaacgtgctggtgatcggcgtcgagttcgaggacggcgacctgttcagcaacgccaacctggccaccctcgaccgcgttacccaggcggtggacaacctgccgggggtcaaccacaacctggtcagcagcctgacccatcgcaactcgcgcaagatctggctgaccgaggtgggttcgatcaactccgagccgtattaccagagcgaattcggtccgatgagcgacgagcagctggcggcgatgaaggccgacgtgctggccaacccgcgcgtatacggcccgctggtgtcgccagacctgaaggtcgcgctggtcaaggcgcagctgatcgaaggccagctcgactacgaggccaccttcgcccagctgcaggcgctgcgccagagcgaggctcgcgaaggcgtgaggatctacgccaccggccagccggtgctggtcggctgggcctacacctacatggaccagatcctgcagatcttcctgttcaccgtgctggccatgctggcgctgctggtgttccacttccgcaaggcctacggcgtgctgatccccctgggcggggtgatgatctcgaccatatggggcctgggcatcatcagtctgctgggctacaacctcgatccgctgggcctggtgattccattcctgatcgccgcccgcgccatgagtcacggcgtgcagctggtggaacgctactacgccgaagtgcgcgtgctaggtgatggaccgctcgcggcgcgtgccaccttcgatagcctgtttcggcccggcacgctgggtatcgcctccgatgcggtggggctggcgctgatcgccatcggctcgatcgccctgaacaccaagctgggtatctacgcctcgctgtgggcgaccaccgtgatcttctcggtgctgatcggcgtgccgctgttgctgtcgatcctgccgaccccgaaggacacggaaatcaaggaaacctttctgcgccacgtcggcggcatctgcgccgcgaccgctgcgcgtcccggtgcggccggcaagctgctgatcttcgctgcgctggcgattctggccgggctctgggcctcgtcgaaggtcaccatcggtgattccgaaccgggctcaccgattctctatccggagcatgactacaacctgtcttccaagcagatcaacgggcgtttccccggttccgaggagctgtacatcattgccgagcacgccgaaaagggcggcatcaaacgccccgaggtgctgaaggctctacagtcgctgcaggcgcacatgcttaccgacccctccgtcggtggcagcaagggcttgccggacctgatcaaacaggtcaaccggctgatgcacaacgacgatccgcgctggtttcaggtgccgcacgatgccgattacgtcggcggcctgatgttcacctatatggcctccagtccaattcccggcgcgctcaacgaattcaacgacaccgacgaccgcatcgccaacctggtcttctactacaaggatcgccagggcgagaccatccgccgcgccatgcacatggccaagcaatggatcgccgagcacggcgaggaggtgccgggcctgagtatccgtctggccggaggcaccctcggcgttgccgcggcgatgaacgagtccgccttcgacaccaacctgctggtgctgccgctggtgtttctgctgatcttcgccttcgtcatgctgttctacaccagctggcacgccgggctgatgatgctgatggcaatgctcttcgccacggtgcttacctacgcctacatgggtctggccgggatgagcatcgacatcaatacggtgccggtgatcgccgtcggcattggcgtgggtatcgactactcgatctacatgatggaccgcatccgcgaggagatggtcaagagcggcaacctcgccgccgccgtgcaccgcgccattgccaccaccggcatggccgtcagcttcaccgccatgaccctgatggccggcatcgtcatgtgggtgctgctttccgacctgcgcttccaggccgatgccgcactgctgctgtgcgtgatgatcgttctcaatggctttacctcaatgctgctggtgcccgcctgggtgctggtgttcaagccgcgcttcatcaccgatgcctatgcagacgaggacgggatcattcacgccgaccacgatctgcccgctgaacccctgccggcgacccagcgggtcgagggtgggctgtcacagggggcggcgcacccggcctga

SEQ ID NO: 36 - protein, 818 aa, Unknown
  From metagenomic library of CO182
MSMHRFTHFFYLAKLWLFRNPRRVLALIGALTLFFAAQIPALKVYTDFADLLPQQHPYIQLHNSIKDTFGGANVLVIGVEFEDGDLFSNANLATLDRVTQAVDNLPGVNHNLVSSLTHRNSRKIWLTEVGSINSEPYYQSEFGPMSDEQLAAMKADVLANPRVYGPLVSPDLKVALVKAQLIEGQLDYEATFAQLQALRQSEAREGVRIYATGQPVLVGWAYTYMDQILQIFLFTVLAMLALLVFHFRKAYGVLIPLGGVMISTIWGLGIISLLGYNLDPLGLVIPFLIAARAMSHGVQLVERYYAEVRVLGDGPLAARATFDSLFRPGTLGIASDAVGLALIAIGSIALNTKLGIYASLWATTVIFSVLIGVPLLLSILPTPKDTEIKETFLRHVGGICAATAARPGAAGKLLIFAALAILAGLWASSKVTIGDSEPGSPILYPEHDYNLSSKQINGRFPGSEELYIIAEHAEKGGIKRPEVLKALQSLQAHMLTDPSVGGSKGLPDLIKQVNRLMHNDDPRWFQVPHDADYVGGLMFTYMASSPIPGALNEFNDTDDRIANLVFYYKDRQGETIRRAMHMAKQWIAEHGEEVPGLSIRLAGGTLGVAAAMNESAFDTNLLVLPLVFLLIFAFVMLFYTSWHAGLMMLMAMLFATVLTYAYMGLAGMSIDINTVPVIAVGIGVGIDYSIYMMDRIREEMVKSGNLAAAVHRAIATTGMAVSFTAMTLMAGIVMWVLLSDLRFQADAALLLCVMIVLNGFTSMLLVPAWVLVFKPRFITDAYADEDGIIHADHDLPAEPLPATQRVEGGLSQGAAHPA

SEQ ID NO: 37 - DNA, 1890 bp, Unknown
  From metagenomic library of CO182
atgcagaaaacaacaagaaaaaacctgcgcaacctgggaatcgccatgcttggcggtaccggcgtggccctgatacccctggccagtgcattggctgaggaagagacgcgctataccggcttctacgaaaacgcgacccatgtgcgcgactcggtgggcctgtcgaaatttcgcaacaccgtgcaggtcaatgccgaccgcgccctggaagaccgcggacgatttcgcaacatcaagttccacggcacctttcgtggcagctatgacggcgtctatgacctgaactccagcgagtacggcagcggggcgggggggccgatcatgctggaaagcaccatggcgggcaccagcgtgccgcatggtggcggtatcaagctgccgaataccttcgacctggcgcgcaaccccaacgaaggcatgatcgtgctcggcgaaaacctgcacaagacgcgcggcggcgtggccttcggcgttccggtgcgcccctgcgacaaggacagccgcggctgtatcgatgactatctggacgccagtagcaatgacctgcggtttcccgagttcaacgagcggctggacttcatccgcgaactgtacatggacttcgaccacggcctgcccaatggcgacatggtcagctggcgcctcggcaagcagcaggtgatatggggacgcaccgacctgttccgtgtgctcgatgtgatcaacccggtcgacttctcgcgcaacaacatctacgacgagcttgaggacatccgcatcccaatgtggatcgccaaggccgactggcggatgggcgccggtgaggtgttcgatgatctcaacctgtcgttcgtctggaacttcgacaagttccgcccgcacaacctcggtcagtgcggtacgcccaactcgatcctcgatgcggcgtgcttcttccgcggcatgaacaacctctgggagaacggcggcaccgtggccaacttcgccggcgccagcccggctggcggcctggctaccgactttggtcccgggcagatcggtatccgcaaggcgcatatgccatcgtggagcctgtccaacacccagttcggcatcaagctggaaggcgtctacggtgaccttggcttcagcctcaatgcgttgacttatcgctcgcagctgccgtccctgcgtggcggtgtgcctgggcagaatgggttcaccggcgaggttgcgccctggccaagcctgattgccttcgatatccacttcccgcgggtcaatctggttggcggttcggtggattactactcgcaggccatcgacacggtgttccgcttcgaggtcgcgcatacctccggtgaggagttcgccaacaccatgcagtcgcggctgttctcggagtccgacgtgactcgctatgtgatcggtgccgacaagaacatcttcattcccttcctcaatccggggcgcgccttcctcttctccggccagctgttcggccagcacatccacgagcaccaggaagagcgtcgtcagtggggcaaggccggcatgccggactgggagcagaactggatcggcaccctgctggtgaaaggctggtggatgaacgaccggctcagcccgcagctactcgccgcgcatgacttcaaggccaaggccaccgcgatcgcgccgagcatcgagtacctgttcaacgacaacctgcggatcatcgccggcgccaacgtcaaggtcggtcgcggtgcccgcgagtatgacgattgccgcagctgcaacccttgggatccctacaccagtgccggccagccgtccgggtacagcctgggcctgggtggctatgagccgctcggccgcttccgtgctggccccattggcatggcgcagaaggaagacgaactccagctcaccctgcgttacagcttctga

SEQ ID NO: 38 - protein, 629 aa, Unknown
  From metagenomic library of CO182
MQKTTRKNLRNLGIAMLGGTGVALIPLASALAEEETRYTGFYENATHVRDSVGLSKFRNTVQVNADRALEDRGRFRNIKFHGTFRGSYDGVYDLNSSEYGSGAGGPIMLESTMAGTSVPHGGGIKLPNTFDLARNPNEGMIVLGENLHKTRGGVAFGVPVRPCDKDSRGCIDDYLDASSNDLRFPEFNERLDFIRELYMDFDHGLPNGDMVSWRLGKQQVIWGRTDLFRVLDVINPVDFSRNNIYDELEDIRIPMWIAKADWRMGAGEVFDDLNLSFVWNFDKFRPHNLGQCGTPNSILDAACFFRGMNNLWENGGTVANFAGASPAGGLATDFGPGQIGIRKAHMPSWSLSNTQFGIKLEGVYGDLGFSLNALTYRSQLPSLRGGVPGQNGFTGEVAPWPSLIAFDIHFPRVNLVGGSVDYYSQAIDTVFRFEVAHTSGEEFANTMQSRLFSESDVTRYVIGADKNIFIPFLNPGRAFLFSGQLFGQHIHEHQEERRQWGKAGMPDWEQNWIGTLLVKGWWMNDRLSPQLLAAHDFKAKATAIAPSIEYLFNDNLRIIAGANVKVGRGAREYDDCRSCNPWDPYTSAGQPSGYSLGLGGYEPLGRFRAGPIGMAQKEDELQLTLRYSF

SEQ ID NO: 39 - DNA, 1260 bp, Unknown
  From metagenomic library of CO182
atgaaaacaatcgcagtcatcggtggcggtatcaccggcgtcactaccgcctatgccctggccaagcgcggcttctcggtcactctgctggaaaagcaccgctacgcggcgatggaaacctccttcgccaacggcggccagctgtcggcctccaatgccgaggtctggaaccactggtcgaccatcgtcaagggcctcaagtggatgctcaagagcgatgcgccgctgctggtcaatcccaagcccagttggcacaagctctcctggttcgccgaattcatcggctcgattcccaattatcggcagaacaccgttgagaccgcacgcctggccatcgccgcgcgcgagcacctgtttgcctgggccgaggccgaaggcatcgacttcgacctgaagaagaagggcatcctgcacatctaccgcgacaaggccggcttcgagcatgccgggctggtctctcgcctgctcgccgaaggcggcctaccgcggcgcagcgtgacgccggaggaaatgcgtgccatcgagccgaccctggccggcacctattacggtggctactttaccgagtgcgactccaccggcgacatccacaagttcacccatggcttggctatggcgatcgagcgactcggcgtgcgttgtctgtatggcgaggacgtgcaggcggtggccactgacggcaagcgcgcgaccgtgacgctgggtggcgctgccggtggcgagcgcctggagttcgacggcctggtgatctgcgccggcaccgccagccgcgatctcgccgcacaactgggcgaccgggtgaacatctatccggtcaagggctactcgatcacggtcaacctgaccgacgaagtcagccgtgcctctgcacccatcgtcagcctgctcgacgatgaaaccaagctggtcagcagccgcctcggcgacgaccgcttccgcgtcgccggcaccgccgagttcaacggctacaaccgcgacatccgtgccgatcgcatccgtccgctggtggactgggtcaaccagtgcttccccggcgtcaacacccgcagcgtggtgccctgggccggtctgcggccgatgatgccgaacatgatgcccaaggtcggccgcggcagcgcgccatgtgtgttctacaacaccggccacggccacctgggctggacgctgagcgcgatcaccgcggacatgatcggtgacgtggtggcgcaaagcctgggccgcccggctccggtagcgtccgggcaaacagccgtcgcctag

SEQ ID NO: 40 - protein, 419 aa, Unknown
  From metagenomic library of CO182
MKTIAVIGGGITGVTTAYALAKRGFSVTLLEKHRYAAMETSFANGGQLSASNAEVWNHWSTIVKGLKWMLKSDAPLLVNPKPSWHKLSWFAEFIGSIPNYRQNTVETARLAIAAREHLFAWAEAEGIDFDLKKKGILHIYRDKAGFEHAGLVSRLLAEGGLPRRSVTPEEMRAIEPTLAGTYYGGYFTECDSTGDIHKFTHGLAMAIERLGVRCLYGEDVQAVATDGKRATVTLGGAAGGERLEFDGLVICAGTASRDLAAQLGDRVNIYPVKGYSITVNLTDEVSRASAPIVSLLDDETKLVSSRLGDDRFRVAGTAEFNGYNRDIRADRIRPLVDWVNQCFPGVNTRSVVPWAGLRPMMPNMMPKVGRGSAPCVFYNTGHGHLGWTLSAITADMIGDVVAQSLGRPAPVASGQTAVA

SEQ ID NO: 41 - DNA, 1515 bp, Unknown
  From metagenomic library of CO182
atgagcgccttcgcctacgccccattcagcacctctaccaatccttactcttcagcaccgccaccctattcagcgcttggcagcatcggacacgtatttcagaaccagctaggacgcaggattcagccaacacaattcaacaccgcgtccccctatcatctgctctgtgaagaagtgccttattcgaagcgcctcgaaatcatgccttacgatccggcgcgctatgaaaaggaagcacaggagggctggcgaaatcccgaagatgtgcacttcttgcacgacacggataacgaaacagataccaacacccaagcgttcatcacccataacgacaagatcgtattgatttccgtccgcggtacgcaggagtttctggccgacgccagccgagatgcagatgcccgccaggtgccatacaaagaaggtgaaggccaagcacaccgcggcttctacaaaggatttcaggctgcaaagccattcgtagagcgctacctaaatgccttttataccggcgaacaaacgctgatcatatgtggccacagcttaggcggggccattgcactcctgctggccgaatggctacggcgcaagcccaccaaacctaaggtaatcctctacaccttcggcgccccacgcgcgggcgacgcggccttcgtcaaagccgcacgttctctcacgcaccaccgtatcgtcaatcacaacgaccccatacctgcgcttccactgccgtggatggatgccgaatggaggctggcactccccggtgcagctttggtgtatagctcaccggctctcggcattgcgctgctcctcgcggggatcgtgaaccttcaaggtgatccctacgagcatcacggggagcaatggcatttcatgccgcgcaagcccggcgcgggcagcgagacggcgattctgtggcagccgggctgcgcgatgattgccgagcagacctgcgctcgtaccatcggcgaaatcggtctggatggagatatgccgaagcgcgttgcgctcgcaggttctcaacactcgagcgacagcggctatgcgcgagcggcgctggccaacctgctgcgctggactgtcagcgtagagcagcgcaacggcaggctgttcaccgacgctgaggttcgcgacatttatgcccaagtcctgagtaccgcgcagctgctggaaagctggcaagcgcgctccttcaatgaattccgctgggagcttaggcgcaggggaataatgcgcttctacggcaagacggatctcgaactgcgcgccatctacgccgatgcggtggagcaaggcgagcgcgttcgagccgaacaaagccccgcattgactcgcacacagcagcgcctgcttgcccaggcggagcgggtggtgtcaatgcgcagcgtctttggcgaacacgcggagcggccggacctgccagagctgatcgcacaatggcgcgccatcgaagacaaccagaatgcggaacggctgtcggccagcacgccacgaagcgccggtgccattgcctaa

SEQ ID NO: 42 - protein, 504 aa, Unknown
  From metagenomic library of CO182
MSAFAYAPFSTSTNPYSSAPPPYSALGSIGHVFQNQLGRRIQPTQFNTASPYHLLCEEVPYSKRLEIMPYDPARYEKEAQEGWRNPEDVHFLHDTDNETDTNTQAFITHNDKIVLISVRGTQEFLADASRDADARQVPYKEGEGQAHRGFYKGFQAAKPFVERYLNAFYTGEQTLIICGHSLGGAIALLLAEWLRRKPTKPKVILYTFGAPRAGDAAFVKAARSLTHHRIVNHNDPIPALPLPWMDAEWRLALPGAALVYSSPALGIALLLAGIVNLQGDPYEHHGEQWHFMPRKPGAGSETAILWQPGCAMIAEQTCARTIGEIGLDGDMPKRVALAGSQHSSDSGYARAALANLLRWTVSVEQRNGRLFTDAEVRDIYAQVLSTAQLLESWQARSFNEFRWELRRRGIMRFYGKTDLELRAIYADAVEQGERVRAEQSPALTRTQQRLLAQAERVVSMRSVFGEHAERPDLPELIAQWRAIEDNQNAERLSASTPRSAGAIA

SEQ ID NO: 43 - DNA, 1221 bp, Unknown
  From metagenomic library of CO182
atggcggaaaaagcgttgaaaaccagtgtgtttacctgggaaggcaccgatcggaaaggtggcaaggtcaagggggagctgccaggccagagcccagcactgatcaaggcgcagcttcgcaagcaaggtatcaatccgctcaaggtacgtaagaagactgtttcgctgttcggtgcgggcaagaagatcaagcccatggacatcgctctgttcacccggcaaatggctacgatgatgaaggcgggagtacccttgcttcagtcgtttgacatcattggggagggtttcgataaccccaatatgcgcaagctggtcgatgagattaagcaggaggtagcggccggtaatagcttcgcgggttcgctgcgcaagaaaccgcagtacttcgatgatctgtattgcaatttggttgaatccggcgagcagtccggagcgctggagacgctgctggatcgggtggcgacctacaaggaaaaaaccgaggcgcttaaggctaagatcaagaaagctatgacatacccaatcgcggtcattgttgtggcgatcattgtttcggcgattttgctcataaaggtcgtgcctcaatttgaaagcgtgttccaagggtttggtgctgagttaccagctttcactcagatggtggttggactgtcgcgctggttgcaggaatggtggtatttggtggctgcagcgctgctcgtgggtgcgtttgttttcaagcacagctacaaacggtcggaaaagtttcgcgatgcgcttgatcgtatcctgcttaaaacgcccatcgtgggcgacatcctctataagtctgtagttgcacgttacgcgcgtacattgtctacgacatttgctgcaggtgttccgttggtggacgcgctggattccgtcgcaggggcaactggcaatgtggtgtttcgcaatgcagtcgcgaaaatccgcaacgacgtatcttctggtgtgcagctgaatttctctatgcgtacgaccggcattttcccttctatggctattcagatgacagccatcggagaggagtccggggcattggacgagatgctggacaaactagccagcttctacgaggccgaggtcgataacatggtggacaatctcacgacgctgatggagcccttgatcatggcggtactgggtgtcctggttggtggcttgatcatcgctatgtacctgccgatcttccagctgggcagcgtggttggataa

SEQ ID NO: 44 - protein, 406 aa, Unknown
  From metagenomic library of CO182
MAEKALKTSVFTWEGTDRKGGKVKGELPGQSPALIKAQLRKQGINPLKVRKKTVSLFGAGKKIKPMDIALFTRQMATMMKAGVPLLQSFDIIGEGFDNPNMRKLVDEIKQEVAAGNSFAGSLRKKPQYFDDLYCNLVESGEQSGALETLLDRVATYKEKTEALKAKIKKAMTYPIAVIVVAIIVSAILLIKVVPQFESVFQGFGAELPAFTQMVVGLSRWLQEWWYLVAAALLVGAFVFKHSYKRSEKFRDALDRILLKTPIVGDILYKSVVARYARTLSTTFAAGVPLVDALDSVAGATGNVVFRNAVAKIRNDVSSGVQLNFSMRTTGIFPSMAIQMTAIGEESGALDEMLDKLASFYEAEVDNMVDNLTTLMEPLIMAVLGVLVGGLIIAMYLPIFQLGSVVG

SEQ ID NO: 45 - DNA, 1704 bp, Unknown
  From metagenomic library of CO182
atgaatgaaaacgcgccccttggcggcttggcccgtcagttagtacttgcaggccagctcgacgaaaagattgctcagcaggctcagcaacaggcactgcgaaaccaagtgcctttggttacctggctggttcagaacaagctggtcaaagggcgggtactgggcgatctcgccgccgagcagttcggcgtgccgttcttcgacctgggggcgctggataaggagacgcaaccaaaagatctggtgagtgaaaagctggtgcgtcagcaccgtgcattgcccttacagaaacgaggcaacaagctttatgtagcggtttccgaccctaccaatcatcaagcgataagcgacatccagttcaacactggcctgtcggtcgaggcggtgctggttgaagacgacaagcttggcgaggccatcgagaagtttttcgagtcggcggctacggcgctcgatgggcttggcgatgctgacctggacgggttggatgtcgagatcagtggggataagaaagaggacgacgcccagcacaacgaagcagacgacgcgccggttgtacgcttcgtcaacaaaatgctactcgacgcgatcaaaggtggctcgtccgacctgcactttgaaccgtacgaaaagacataccgtgtgcgcttccgcaccgacggtatgttgcacgaggttgctcgaccgccggtccagttggtcagccgtatttctgcgcgcttgaaagtaatggccagtctggatatcgccgagcggcgcaagccgcaggacgggcgcatcaagatgaaggtatccagtaccaaatccatcgattttcgcgtcaacacgctacctaccctatggggcgagaaaattgtgatgcgaattctggactcgtcaagcgccaagatgggcattgatgctctgggctacgaggaagaccagaaagagttgtatctgaccgcgctgaagcagccgcaggggatgattctggttaccggcccgactggctcgggtaagaccgtttcgctgtataccggcctgaatattctcaacacggtggacgtgaatatttccaccgcagaagaccccgtggaaatcaatctggagggcatcaaccaggtcaatgtcaatccgaggcagggtatggactttgctcaggcgcttagggcgttccttcgtcaggatccggatatcatcatggtgggtgagatccgtgatttggagactgccgagatcgccatcaaggcggcgcagactggtcacatggtcatgtcgacattgcacaccaatagcgcagctgaaacgctcacccggctgcgcaatatgggggtgccggcgttcaatatcgctacctcggtgaacctgatcattgcgcagcgcttggcacgcaaactatgccccagctgcaagcaagaagttgatgtgccgcgtgatgtcctgctcaaagagggttttccagaagcgcggatcggttcgttcaagctttatgggccggtaggttgtgatagctgcaagagcggttacaaaggccgtgttggtatttatgaagtggttaaaatcacgcctgcactgcagcggcttatcatggaggaaggcaattccatcgacatcgccgtgcaggcgcgcagagatgggttcaatgacctgcgcacttcgggtctggttaaagccatgaatggcgttaccagcctggaagaagtcaaccgcgtgaccaaggattaa

SEQ ID NO: 46 - protein, 567 aa, Unknown
  From metagenomic library of CO182
MNENAPLGGLARQLVLAGQLDEKIAQQAQQQALRNQVPLVTWLVQNKLVKGRVLGDLAAEQFGVPFFDLGALDKETQPKDLVSEKLVRQHRALPLQKRGNKLYVAVSDPTNHQAISDIQFNTGLSVEAVLVEDDKLGEAIEKFFESAATALDGLGDADLDGLDVEISGDKKEDDAQHNEADDAPVVRFVNKMLLDAIKGGSSDLHFEPYEKTYRVRFRTDGMLHEVARPPVQLVSRISARLKVMASLDIAERRKPQDGRIKMKVSSTKSIDFRVNTLPTLWGEKIVMRILDSSSAKMGIDALGYEEDQKELYLTALKQPQGMILVTGPTGSGKTVSLYTGLNILNTVDVNISTAEDPVEINLEGINQVNVNPRQGMDFAQALRAFLRQDPDIIMVGEIRDLETAEIAIKAAQTGHMVMSTLHTNSAAETLTRLRNMGVPAFNIATSVNLIIAQRLARKLCPSCKQEVDVPRDVLLKEGFPEARIGSFKLYGPVGCDSCKSGYKGRVGIYEVVKITPALQRLIMEEGNSIDIAVQARRDGFNDLRTSGLVKAMNGVTSLEEVNRVTKD

SEQ ID NO: 47 - DNA, 843 bp, Unknown
  From metagenomic library of CO182
atgggtaaaatcaaaagtctgccactagcgctcgccgtattcggctttgtgctcttcgccagcatctacgccacgcgcgctcagatactcgtatcaccgacaccaaaattttccacagaccgcatttcactttccgctccgctgttgatggtattgcatggaggcgatcaatttcttgcggccaatttggagactatgcgccttgccgccaccggcatgaatgattacggcgtggataccgactacctgattcgcgcccagcgtgaagtagcccgcctcaacccctgccatgaagacaattattatctcgccaacggcctgctgacctggggcggtgcggtggagcagggcaatgaggtactgcgcgcggccgttgattgccgcttctgggacgaatttccacccttcttctatggcatcaacctgtcgtttttccagcgcgacaacgaggaagccgcgcgggtgctcgagattggcgcacagcgatcgacagtgaacgccgccgcgatgcagaaactggcggtgatgctgcgcgccgaacgatttgccgacgaaagactggctttgaattacctggcccaacaacgcgacagcgccagcgatccgaaattgcgcgacatgttggacaagcgcgtcatccgcttgcagggcttgatctatttacgcgaggcccagcgtcgctatgagatcgatcaaggcccgctagctgacatgcaggacctgatcgaacaggacatcatcgccgagctacccaccgacccactacgcctcggctatgagctacgcaatgggcgcatcgaattgaagaaattgaagattgccggattggaggaacagccttga

SEQ ID NO: 48 - protein, 280 aa, Unknown
  From metagenomic library of CO182
MGKIKSLPLALAVFGFVLFASIYATRAQILVSPTPKFSTDRISLSAPLLMVLHGGDQFLAANLETMRLAATGMNDYGVDTDYLIRAQREVARLNPCHEDNYYLANGLLTWGGAVEQGNEVLRAAVDCRFWDEFPPFFYGINLSFFQRDNEEAARVLEIGAQRSTVNAAAMQKLAVMLRAERFADERLALNYLAQQRDSASDPKLRDMLDKRVIRLQGLIYLREAQRRYEIDQGPLADMQDLIEQDIIAELPTDPLRLGYELRNGRIELKKLKIAGLEEQP

SEQ ID NO: 49 - DNA, 759 bp, Unknown
  From metagenomic library of CO182
gtgacagttgcgcttaccactctggttcaggaggcagaccgctatctggatgccgcgaagattgccgactattgccctaatggcctgcaggtcgaggggcgtccacacgtcgcgcggatcgtcagcggcgtgacggccagccaggcactgctggatgcggcagtcgaggcgaaagccgacgtggtactggtgcatcacggttatttctggaagaacgaggacgcgcgcatcatcggcatgaaacagcgccgcctgaagacgttgctggtcaatgggatcagtctgctggcctatcaccttccgctcgatgtacatcccgaagttggtaacaacgtgcgattgggcgcgctgctcggtctgcaagtcgaggggccgctggatccgagcaatccccgttcggtgggcctggttggttccctggagaaatccctgactgcaagcgagttccggcagcggatacaggatgtgctaggccgcgcgccactgatggtcgagggcaatggcccgatcaagcgcgtagcctggtgcaccggtggtgctcaggggtacatcgaacaggcggtagcggctggcgtggacgcctatctcaccggggaaatatccgagccgacggcacatgtcgcgcgtgaaaatggcctgagcttctttgccgcagggcatcacgccaccgagcgctatggcgtccaggcgctgggtgagtaccttgccagccggttcggcgtcgagcaccagttcatcgactgccctaaccctgcgtga

SEQ ID NO: 50 - protein, 252 aa, Unknown
  From metagenomic library of CO182
MTVALTTLVQEADRYLDAAKIADYCPNGLQVEGRPHVARIVSGVTASQALLDAAVEAKADVVLVHHGYFWKNEDARIIGMKQRRLKTLLVNGISLLAYHLPLDVHPEVGNNVRLGALLGLQVEGPLDPSNPRSVGLVGSLEKSLTASEFRQRIQDVLGRAPLMVEGNGPIKRVAWCTGGAQGYIEQAVAAGVDAYLTGEISEPTAHVARENGLSFFAAGHHATERYGVQALGEYLASRFGVEHQFIDCPNPA

SEQ ID NO: 51 - DNA, 1158 bp, Unknown
  From metagenomic library of CO182
atgttcaatgccctacgtttcctcggctggccgttgctggtcggcctgctcgtagctctgctgatcatccagcgatacccgcaactggtcggcatcaaagagcgcgacatcggtctgcggcaggcgccgttggttgccaccacgccgcaacagggtccctattcctatgccaacgcggtcgcaggcgccgctccggcagttgccaacctctataccaccaaggtcatcgagaagaccgagcagcaggcgccgctgtcaaaagacccgctgtttcaacgcttcttcaacgataacctgccgaggcagcggcggatggagtcgagcctcggctcagcggtgatcatgagcccggaaggctatctgctgaccaacaaccatgtaacggcgaacgccgagcagatcgtagtggcgctcaaggatgggcgggaaacgctggctcgggtaatcggcagcgacccggaaaccgacctcgccgtattgaagatcgacctggcggacctgccggccatcaccgtcggccattctgaccgcatacgcgtcggcgacgttacgctggcgatcggcaacccgttcggcgtcggccagacggtcaccatgggcatcatcagcgccaccggccgcaaccagctgggcctgaacacctatgaagacttcatccagaccgacgcagcgatcaaccgcggcaactccggcggcgcattggtggatgccgagggcaacctgatcggcatcaacaccgcgatcatctccgagtcgggcggctcgcagggcattggtttcgcgattccggtgaaactcgcgctggaggtgatgaagtctatcatcgaccacggccaggtcatccgtggctggctgggcgtggaggtgcagtcgcttacccaggagctggcagaatcctttggccaggaaggccgccccgggattgtcgtggctggcgtctaccgcgacggcccagccgcccgcgcggggctgcagcctggagatttgattttgagcatcgacggggtgcagtcagccgacggccgcagctcgatgaaccaagtcgcccgcgcccgcccaggcgacaagatcgacatcgatatcttgcgcaacggcaagccgctaacgctgaccgcagaagtgggcatgcgcgccccggtgagtacggctccgaaatag

SEQ ID NO: 52 - protein, 385 aa, Unknown
  From metagenomic library of CO182
MFNALRFLGWPLLVGLLVALLIIQRYPQLVGIKERDIGLRQAPLVATTPQQGPYSYANAVAGAAPAVANLYTTKVIEKTEQQAPLSKDPLFQRFFNDNLPRQRRMESSLGSAVIMSPEGYLLTNNHVTANAEQIVVALKDGRETLARVIGSDPETDLAVLKIDLADLPAITVGHSDRIRVGDVTLAIGNPFGVGQTVTMGIISATGRNQLGLNTYEDFIQTDAAINRGNSGGALVDAEGNLIGINTAIISESGGSQGIGFAIPVKLALEVMKSIIDHGQVIRGWLGVEVQSLTQELAESFGQEGRPGIVVAGVYRDGPAARAGLQPGDLILSIDGVQSADGRSSMNQVARARPGDKIDIDILRNGKPLTLTAEVGMRAPVSTAPK

SEQ ID NO: 53 - DNA, 1443 bp, Unknown
  From metagenomic library of CO182
atgagtgaactgctgttacccgtcaccgagcgcctgctgacccctggcggcctgggtatcgacgatctgcccggcctgctcggcgagcttgccggccccggcgtggatgctgcggacctgtattttcaggaccaggtgtccgagtcgtgggtactcgaggacggcatcgtcaaggaaggcggcttccacctggagcagggcgtcggcgtgcgtgcgctgtctggcgagaagaccggcttcgcctatagcaatgccatcaccgccgatgcgctgcgccaggccgctcaggctgcgcgctcgattgcgcgaagcgggcagcagggccaggtcagggttctgtccaaggcggcattcgctccgctgtacagccgggacaatccgctcgatgggctgagccgcgccgagaaggtcgagctgctcaagcgcatcgatgtcgcgacccgtgcgctggacccgcgtatcaagcaggtcactgtgagcctggcgggtgtctgggagcacatcctggtggctggcatggatggcggcatggcgaccgatatccggccgctggtgcgcttcaacgtcagcgtgatcgtcgagcagaacggtcggcgtgagcgtggtgggcagggcggcggtggtcgcaccggctatcagtacttcctgaccgaggaccgcgccatgggctacgcccgcgaagccctgcgccaggcgctggtcaacctcgaggcggtgccggcaccggccggttcgttgccggtggtgctcggccctggctggtccggcgtgctgctgcacgaagccgtggggcatggcctggagggtgatttcaaccgcaagggcagttcggcctatagcggccggattggcgagcaggtcgcgtccagtctttgcaccatcgtcgacgacggtaccctggccgaccgtcgtggttcgctcagcgtcgatgatgaggggactccgacgcagtgcaccacgctgatcgagaacggcattctcaagggctatatccaggacaagctcaacgcacggctgatgggcgttgcgccgaccggtaatggccgccgcgagtcctatgcgcacctgccgatgccgcgcatgaccaatacctacatgctcgccggcgagagcgatccgcaggagatcatccgctcggtgaagaagggcatctactgcgccagccttggtggtgggcaggtcgatatcaccagcggcaagttcgtcttctctaccagcgaggcgtacctgatcgaggatggcaagatcaccgcgccggtgaagggcgcaaccctgatcggcaacggtccggaggtgatgaaccgggtgtcgatggtcggcaacgatctggcgctggacagtggtgtgggtacttgcggaaaggatgggcagtcggtgccggtgggcgtcggtcagccgacattgaaaatcgatgagatcacggtaggcggaacaggcgcttga

SEQ ID NO: 54 - protein, 480 aa, Unknown
  From metagenomic library of CO182
MSELLLPVTERLLTPGGLGIDDLPGLLGELAGPGVDAADLYFQDQVSESWVLEDGIVKEGGFHLEQGVGVRALSGEKTGFAYSNAITADALRQAAQAARSIARSGQQGQVRVLSKAAFAPLYSRDNPLDGLSRAEKVELLKRIDVATRALDPRIKQVTVSLAGVWEHILVAGMDGGMATDIRPLVRFNVSVIVEQNGRRERGGQGGGGRTGYQYFLTEDRAMGYAREALRQALVNLEAVPAPAGSLPVVLGPGWSGVLLHEAVGHGLEGDFNRKGSSAYSGRIGEQVASSLCTIVDDGTLADRRGSLSVDDEGTPTQCTTLIENGILKGYIQDKLNARLMGVAPTGNGRRESYAHLPMPRMTNTYMLAGESDPQEIIRSVKKGIYCASLGGGQVDITSGKFVFSTSEAYLIEDGKITAPVKGATLIGNGPEVMNRVSMVGNDLALDSGVGTCGKDGQSVPVGVGQPTLKIDEITVGGTGA

SEQ ID NO: 55 - DNA, 1056 bp, Unknown
  From metagenomic library of CO182
ggctcgctgggcgagcgcaattcgctgtcgtgcggttccatcgagcacaagatgggcatccaggcgtcggctacctgcgtgatgaacttcgatggcgccgtcggctggatggtcggcgagccgaacaagggcctggcggcgatgttcaccatgatgaactacgagcgcctgggcgttggcatccagggtctggcaaccggcgagcgttcctatcagagcgcaatcgagtacgcccgcgatcgcatccagagtcgcgcaccgaccggacctgtggctcaggacaaggcggccgatccgatcatcgtgcatcccgacgtgcgccgtatgctgctgaccatgaaggctctgaacgagggtggccgagcattctccagctacgtcgcgctacagctcgacattgccaagttcagcgatgatgacgaggcccgtcagcgcgccgaggcgcaggtcgcactgctgacccccgttgccaaggccttcctcacggatatggggttggaaaccaccgtacatggtcagcaggtatttggcggccacggcttcatccgcgaatgggggcaggagcagctggtgcgcgattgccgtattacccagatctacgaaggtactaatggcatccaggcgctggacctggtcggccgtaagatcgtcggcagcggcggcaccatgtatcaggcttttgtcgacgagatccgcgccttcatcgccgatgctggtccggagctgacagagttcgccgagccgctcaaggccgccatggacaacctggacgagctgacagcttgggtcatcgataaggccaaggctaatccgaacgagatcggtgccgcctcggtggaatacctgcatgtattcggttacaccgcctacgcctacatgtgggcgcgcatggctgcggtcgcgtttgccaagcgggaggagggcgacttctaccagagcaagcttggtaccgcgcgcttctatttcgcccggctgcttccacggatccattcgctgagcgcttcggttaaggctggtagcgagtcgctgtacctgctcgacgcggctcaattctga

SEQ ID NO: 56 - protein, 351 aa, Unknown
  From metagenomic library of CO182
GSLGERNSLSCGSIEHKMGIQASATCVMNFDGAVGWMVGEPNKGLAAMFTMMNYERLGVGIQGLATGERSYQSAIEYARDRIQSRAPTGPVAQDKAADPIIVHPDVRRMLLTMKALNEGGRAFSSYVALQLDIAKFSDDDEARQRAEAQVALLTPVAKAFLTDMGLETTVHGQQVFGGHGFIREWGQEQLVRDCRITQIYEGTNGIQALDLVGRKIVGSGGTMYQAFVDEIRAFIADAGPELTEFAEPLKAAMDNLDELTAWVIDKAKANPNEIGAASVEYLHVFGYTAYAYMWARMAAVAFAKREEGDFYQSKLGTARFYFARLLPRIHSLSASVKAGSESLYLLDAAQF

SEQ ID NO: 57 - DNA, 648 bp, Unknown
  From metagenomic library of CO182
atgtcgctacgctcgcagatactggtcaacaaacaggcactgcctaatgccgagcaggcgttgcccggccgctcgacagccgtaccagtaccaccagcccattatgtaaacggcaaccctttgcagccgccctttccggccggcttatcccaagccatattcgccatggggtgcttttggggagcagagcgccgcttctgggagttaccaggggtgtggacgacagccgtgggctactccggcggcttgacaccgaacccgacctacgacgaagtctgttccggcctgacaggccatacggaggtggtgctggtggtattcgaccctcagcagatcgattactccactttgctgcgaacgttctgggaggcgcacaaccccacccaggggatgcgccaaggcaacgatatcggcagccagtaccgctcggcgatctattgcacggatgcgcaacagcgcagcgaggcggagaccagtcgggagcgctttcagcagcgtctgagcaatgctggctttccggcaatcaccaccgagatagccgacgcaccgccgttctactatgcggaggcttaccaccagcagtatctggcaaaaaatccgggcggctattgcgggctgggtggcactggcgtctgcatgccggactga

SEQ ID NO: 58 - protein, 215 aa, Unknown
  From metagenomic library of CO182
MSLRSQILVNKQALPNAEQALPGRSTAVPVPPAHYVNGNPLQPPFPAGLSQAIFAMGCFWGAERRFWELPGVWTTAVGYSGGLTPNPTYDEVCSGLTGHTEVVLVVFDPQQIDYSTLLRTFWEAHNPTQGMRQGNDIGSQYRSAIYCTDAQQRSEAETSRERFQQRLSNAGFPAITTEIADAPPFYYAEAYHQQYLAKNPGGYCGLGGTGVCMPD

SEQ ID NO: 59 - DNA, 2946 bp, Unknown
  From metagenomic library of CO182
atgagtctgcccccgctggttgcattgccgtcctcgctcctgccttttgtcagtcgagccgaagagtcgttcctcgccgctgccggcagcctgtcggaagcacttgcggcacgttgtcacgtctggttggctgagcagcgtgaggcgttcagtcgggtctgtgcagcgagcgatttcgtcagcgaacaggttagtcgagatccgcagatgctgctgcagctggccgagctgggctggctggagcggtcgctcgaggctggcgaaatgcgcgaagcactcggcgagctggtcggtgcctgcgacaacgaagacgccttggcgctgaccttgcgccgctttcgcaatcgccagcaggtgcgcatcatctggcgcgacctgactcgtcgggccgatctcgctgaaacctgccgtgacctttccgatctcgccgatgcctccgtcgatctggcttatcactggctgtacgtgcgtcattgcgagcagttcggcgtaccgaccgggcgtcgcagcggcaccgcgcagcacatggtcattcttggcatgggcaaactgggcgcccatgagcttaatctctcttccgacatcgacctgatcttcggctatccggaaggcggcgagacagtcggcgccaagcgctcgctggacaatcaggagttcttcgtccgcctcggtcagcggctgatcaaggcgctggacgcgatcactgccgatggctttgccttccgcgtcgatatgcgcctgcgcccgtacggctcgtccgggccgctggtgtacagcttcaatgcactggagcagtactaccaggaccaggggcgcgactgggagcgctacgcgatgatcaaggcgcgggtgatcggcggcgaccagcaggccggcaaggagctgctggagatgctgcggcccttcgtctatcggcgctatctggacttctcggcgatcgaagcgctgcgcaccatgaagcagctgatccagcaggaagtgcggcgcaagggcatggccgccaatatcaagctcggtgctggtggtatccgcgaagtcgagttcatcgctcaagcctttcagctgatccatggcgggcgcgatctcagcctgcagcagcgtccgctgcttggcgtgctggccaccctggaagggcagggctacctgccagccgcggcggtcgtcgaactgcgtgaaggctacgaattcctgcgctacaccgagcacgcactgcaggccatcgccgatcggcagacgcagatgctgccggaaagcgaagtcgactgcgcgcgggtcgccttcatgctcggcttcgacagctggccggcctttcacgagcgactcctgcactggcgtgggcgcatcgactggcatttccaccaggtgatcgccgacccagacgaggacgaagccgccgaaggcgatgcattggtcggcggtgagtggttgccgctgtgggagcaggactgggacgaggaattcgcctgccgacagctgtccgaagccggctttcgcgacggccagggcgcctgccagcgccttgccgcactgcgcaatgccagtcaggtgcgcaccatgcagcgtctcggtcgtgaacgactggatgccttcattccccgcctgctggcgcagactgtcgagcaggccgaccccgatctcgtgctcgaacgtgtgctgccgctggtggaggcggtcgcccggcgttcggcctatctcgtattgctgaccgaaaaccccggtgcgctgcagcgattgctcgagctctgtgcggcgagcccgtggatcgccgagcagatcgcccgcttcccgctgttgctcgacgagctgctcaacgccggtcgtctgtacagcccgccgctggcgccggaactggcggctgaactgcgcgaacggctgatgcgcatccctgaggacgacctcgagcagcagatggaggcgttgcggcatttcaagctggcgcaccggctgcgcgttgccgcctcggagatcgccggtacgctgccgttgatgaaggtcagcgactacctgacctggctggccgaggcgattctgcaggaagtgctgaccctggcctggcgccacactgtcgcgcgtcatggccagccgcagcgcagcgacggcacgctctgcgatccggcattcgtcatcgtcggttacggcaaagtcggcgggatcgagctcggtcacggctccgatctggatctggtgttcatccacgacggcgaccctgctgcggagaccaatggcgccaagcccatcgacaccgcgcagttctttacccgtctggggcagcgcatcatccatctgctgaccacccagaccacctctggccagctctatgaagtggacatgcgcctgcgcccgtccggcgcttccgggctgctggtcagctcgctgggcgccttcgagcgctatcagagtcaggaggcctggacttgggaacatcaggcgctggtgcgtgcgcgtgtacttgtcggctgcccgcagctgaccaccgatttcgagcgggtgcgtgccgctgtgctcggtcgcgaacgcgatctggatgcgctgcgccgcgaggtcagcgacatgcgcgcgaagatgcgcgacaacctcggtacccgggcgacgcatgcggggaccgctgagcaagccttcgacggcgcggccgagttcaatctcaagcaggacgccggtggtatcgtggatatcgaatttatggtgcaatacgcggctttggcgtggtcgcaccagcatcccgaactgctgcgctataccgataacatccgcattctcgatgggttggagcaggccgggttgatgaccggcgatgaggtccggctgctgcaggacgcctacaaggcctaccgcgcggcagcccaccggcaatcactgcagaagcagcccggactggtgagtggggatcaattccacgacgagcgtcgcgcagtcatgcgtatctggcgcgagttggggctcagctga

SEQ ID NO: 60 - protein, 981 aa, Unknown
  From metagenomic library of CO182
MSLPPLVALPSSLLPFVSRAEESFLAAAGSLSEALAARCHVWLAEQREAFSRVCAASDFVSEQVSRDPQMLLQLAELGWLERSLEAGEMREALGELVGACDNEDALALTLRRFRNRQQVRIIWRDLTRRADLAETCRDLSDLADASVDLAYHWLYVRHCEQFGVPTGRRSGTAQHMVILGMGKLGAHELNLSSDIDLIFGYPEGGETVGAKRSLDNQEFFVRLGQRLIKALDAITADGFAFRVDMRLRPYGSSGPLVYSFNALEQYYQDQGRDWERYAMIKARVIGGDQQAGKELLEMLRPFVYRRYLDFSAIEALRTMKQLIQQEVRRKGMAANIKLGAGGIREVEFIAQAFQLIHGGRDLSLQQRPLLGVLATLEGQGYLPAAAVVELREGYEFLRYTEHALQAIADRQTQMLPESEVDCARVAFMLGFDSWPAFHERLLHWRGRIDWHFHQVIADPDEDEAAEGDALVGGEWLPLWEQDWDEEFACRQLSEAGFRDGQGACQRLAALRNASQVRTMQRLGRERLDAFIPRLLAQTVEQADPDLVLERVLPLVEAVARRSAYLVLLTENPGALQRLLELCAASPWIAEQIARFPLLLDELLNAGRLYSPPLAPELAAELRERLMRIPEDDLEQQMEALRHFKLAHRLRVAASEIAGTLPLMKVSDYLTWLAEAILQEVLTLAWRHTVARHGQPQRSDGTLCDPAFVIVGYGKVGGIELGHGSDLDLVFIHDGDPAAETNGAKPIDTAQFFTRLGQRIIHLLTTQTTSGQLYEVDMRLRPSGASGLLVSSLGAFERYQSQEAWTWEHQALVRARVLVGCPQLTTDFERVRAAVLGRERDLDALRREVSDMRAKMRDNLGTRATHAGTAEQAFDGAAEFNLKQDAGGIVDIEFMVQYAALAWSHQHPELLRYTDNIRILDGLEQAGLMTGDEVRLLQDAYKAYRAAAHRQSLQKQPGLVSGDQFHDERRAVMRIWRELGLS

SEQ ID NO: 61 - DNA, 810 bp, Unknown
  From metagenomic library of CO182
atgagcacgacgctgcacgaactgcaccgcccgctgggcagcaccggcctgcgcatttcgccgctgggtctgggcacggtgaagctgggccgcgaccaaggcgtgaaataccccagcggcttcgccattcccgacgacgcccaggctcgccagcttctggctctggcccgcgagctgggcatcaacctgatcgataccgccccagcctacggggtcagcgaagagcggctcggtccgctgctgaccggccagcgcgaggagtgggtgatcgtcagcaaggtcggagaggagttcgagaacggccagtcgcgcttcgacttttccgccgcgcacacgcgcttttcggtcgaacgcagcctcaagcgtctgcgcaccgaccgcatcgagctggtgctggtgcattccgatggcaacgatctggacatcctgcagcacgccgaggtctaccagaccctggccgagctcaagcgcgagggcaagatcctcggctacggcctgtccggcaagacggtcgatggcgggctgctggcactgcagcagggcgactgcgcgatggtcacctacaacctcaacgagcaggccgaacggccggtcctcgactacgctgcagcccacggcaagggcatcctgatcaagaaggccctggccagcggacatgcctgcctcaagccaggcgacgacccggtccgtcgcagtttcgagctgctgttcggtcacccaggtgtcagcggcgcgatcatcggcactatcaatccgcagcatttgacgtctaacgtagccactgctgccgccgtcctgacgggcaattga

SEQ ID NO: 62 - protein, 269 aa, Unknown
  From metagenomic library of CO182
MSTTLHELHRPLGSTGLRISPLGLGTVKLGRDQGVKYPSGFAIPDDAQARQLLALARELGINLIDTAPAYGVSEERLGPLLTGQREEWVIVSKVGEEFENGQSRFDFSAAHTRFSVERSLKRLRTDRIELVLVHSDGNDLDILQHAEVYQTLAELKREGKILGYGLSGKTVDGGLLALQQGDCAMVTYNLNEQAERPVLDYAAAHGKGILIKKALASGHACLKPGDDPVRRSFELLFGHPGVSGAIIGTINPQHLTSNVATAAAVLTGN

SEQ ID NO: 63 - DNA, 1176 bp, Unknown
  From metagenomic library of CO182
atgcctgaacccctcagcaccgacgtcctgatcgttggcggcggcgtcgccggcctctggctcaacgcgcgcctgcgcagacaaggttttgccacgttgctggtggacaagggaacgcttggcggcgggcagagcgtgaagtcccagggcatcattcatggcggcaccaagtacgcgctgagcggtgcccttaccggcgcctccgaggcgattgcggacatgccgcggcgctggcgcgaagccctcgaaggcacgggcgagctggacctcagcggcgtgcgtctgttgtccgatgcgcactatctgtggtcgccgggcaccctggccggcaacctcaccagcttcttcgccagcaaggcggtgcgctcgcgggttggtcaggtcaagggcgaagagctgccgcccgcgctgcagcatccggaattcaaaggcaaggtctaccgcctcagtgaactggtgcttgatgtgcccagcctgatcgcccgcctggctgagctggccggcgacagcctgctggctggtcagcagatcgagccgctgcatgacggtggcgagctggtcggcctgcgcgtcgacggccgcgagatccgcgcccagcgcatcgtgtttagcgcaggtggcggaattgccgagctgctcgcgtcgctcggcctgcagcaaccggccatgcagcgccgcccgctgcacatggtcatcgtcaaggcgccgacgctcaagccactgtacgctcactgtctgggcggcggcaccaagccgcgcatcaccgttaccagccatccggcggcggatggcgagtgggtctggtatctcggtggcgacctggccgaagccgacggcgtggcgcgggacgaagccagccagatcgccgcggcgaaaaaggaactggccgaactggtgccctggatcgatctgtctgccgcgcactgggccacgctgcgtatcgaccgcgccgagccggcgcaatcggcgctcgcccgtccggataacgcctttctcgccgagcagagccgtctgctggtcggctggccgaccaagctggcgttgtcaccggacttttccgaccgcgtcgaagccgccctcgcccgcgacggcattcgccccggccagcatcccacactacctgaactgccacgtccgccgctgaccgggcctttctgggaaggcctgctgccatga

SEQ ID NO: 64 - protein, 391 aa, Unknown
  From metagenomic library of CO182
MPEPLSTDVLIVGGGVAGLWLNARLRRQGFATLLVDKGTLGGGQSVKSQGIIHGGTKYALSGALTGASEAIADMPRRWREALEGTGELDLSGVRLLSDAHYLWSPGTLAGNLTSFFASKAVRSRVGQVKGEELPPALQHPEFKGKVYRLSELVLDVPSLIARLAELAGDSLLAGQQIEPLHDGGELVGLRVDGREIRAQRIVFSAGGGIAELLASLGLQQPAMQRRPLHMVIVKAPTLKPLYAHCLGGGTKPRITVTSHPAADGEWVWYLGGDLAEADGVARDEASQIAAAKKELAELVPWIDLSAAHWATLRIDRAEPAQSALARPDNAFLAEQSRLLVGWPTKLALSPDFSDRVEAALARDGIRPGQHPTLPELPRPPLTGPFWEGLLP

SEQ ID NO: 65 - DNA, 813 bp, Unknown
  From metagenomic library of CO183
aatctacccggcggttttcccttcacgccgggccgcgaagtcgcgggcgtgatcgaacggatcggccccggggtgaccgcttttcaaccgggcatgcgggtagtggcgaacatgcataccggcggttatgccgaatatgccattgcgtcggccggtgagttggtgctcctgccggacagggccgatttccagcaggccgtggtctacaacatcaacctgcgggtggcttacctctattaccacaccttcggcaacgtccagccgggcgaggtcatcctggtccacgccgcggcgggtggcatcggcggcctggtgacccagatcgccaagcggcgggggcgcaacgaggtgattgcgctggcgagttccgatgaaaagctcgccttttgccgcgccaacggggcggatcactgcatcaataccagccgcgacgactatgtcgccgaagtgctgcgcattacgggcggacgtggggtcgacgtctcgttcaacagcgtcgccgggccgacgctggcgaccgacccgcacgccatccgcccgctcgggcgctggctgatcaacggctatgcgggcgggcgagccttgctcgatcccaatgccatcatgcccaagtccctgaccgtgaagatcttctctgtctactcggtcttcggaaccgaggagttccgcaaggcgaccgagttcttgcaggactggttgcaaaacgagccgctcgaaggctgttcctgcacctttccgctggaggaagcagccgaggctcatcgctggatcgaaagccgtcagtcgcacggaaagatctgcctcgtcccctag

SEQ ID NO: 66 - protein, 270 aa, Unknown
  From metagenomic library of CO183
NLPGGFPFTPGREVAGVIERIGPGVTAFQPGMRVVANMHTGGYAEYAIASAGELVLLPDRADFQQAVVYNINLRVAYLYYHTFGNVQPGEVILVHAAAGGIGGLVTQIAKRRGRNEVIALASSDEKLAFCRANGADHCINTSRDDYVAEVLRITGGRGVDVSFNSVAGPTLATDPHAIRPLGRWLINGYAGGRALLDPNAIMPKSLTVKIFSVYSVFGTEEFRKATEFLQDWLQNEPLEGCSCTFPLEEAAEAHRWIESRQSHGKICLVP

SEQ ID NO: 67 - DNA, 861 bp, Unknown
  From metagenomic library of CO183
atggctttcaaccttggcgcacgcatgacttcccgatctcaccgcaagacccggccagaacccgcctgccgcgacgacaccggcctgcacctggtgccacccggcctggggctggtcatgctggaggcccgtgcaccctgggaggccatggcaatggcggcagtgtcaccctggctctcgcgcatgccatcgggcgacggccatgccgtgctggtcttccccggcctgggcgcgtcggacatcagcacgctggcactgcgccgcttcctcaagcagcatggctaccaggcccatggctggaaacagggcctgaacctcggcccgcgcgacggcgtgctggaaggctgccgcgagcgcatcgagcagctgcacgcgcaacacggcggcaagatcagcctgatcggctggagcctgggcggcatttacgcccgcgaaatggccaaggaaatgcccgacatggtgcgcagcgtcatcacgctgggcacgccgttcaccggccaccctaaggcaaccaatgcctggcgcttttaccagtgggtcagcaagcagcaggcccacgacgaggagctgctggccgaggtgcgcaagccgccccccgtgcccaccacctccatctacagcaagaccgacggcatcgtggcctggcaatgcagcatcaacccgccacggcacgcccacaccgagaacatcgaggtgcacgccagccacatcggcatgggcatgaacccgctggccatgtacgccattgccgaccgtctgcgccaggacccggcgcactggaaacgcttcgatgcccagggtgcacgccgctggttcttcaaggtggcgcaccagcccgagatggtcacgcagtggtattga

SEQ ID NO: 68 - protein, 286 aa, Unknown
  From metagenomic library of CO183
MAFNLGARMTSRSHRKTRPEPACRDDTGLHLVPPGLGLVMLEARAPWEAMAMAAVSPWLSRMPSGDGHAVLVFPGLGASDISTLALRRFLKQHGYQAHGWKQGLNLGPRDGVLEGCRERIEQLHAQHGGKISLIGWSLGGIYAREMAKEMPDMVRSVITLGTPFTGHPKATNAWRFYQWVSKQQAHDEELLAEVRKPPPVPTTSIYSKTDGIVAWQCSINPPRHAHTENIEVHASHIGMGMNPLAMYAIADRLRQDPAHWKRFDAQGARRWFFKVAHQPEMVTQWY

SEQ ID NO: 69 - DNA, 750 bp, Unknown
  From metagenomic library of CO183
atgaaggttttggtccctgtcaagcgcgtggtggactacaacgtgaaggtccgtgtgaagtcggacggcacgggtgtggacatcgccaacgtgaagatgagcatgaacccctttgacgaaatcgccgtcgaagaggccgtgcgcctgaaagaaaaaggcgtggtgaccgaagtcatcgccgtcagctgcggcgtagcgcagtgccaggagaccctgcgcaccgccatggccattggcgccgaccgcggcatcctggtggaaaccgccgaagaactgcagcccctggccgtggccaaactgctcaaggccctggtggacaaagaacaacccggcctcatcatcctgggcaaacaagccatcgacgacgacgccaaccagaccggccagatgctcgccgccctggcagacctgccccaggccaccttcgcctccaaggtcgaagtggccggtgacaaagtcaacgtcacccgagaagtggacggcggcctggaaaccctgagcctcacgttgcccgcagtcatcaccaccgacctgcgcctgaacgagccgcgctacgtcacgctgcccaacatcatgaaggccaagaaaaagcagctcgacaccgtccgccccgaagacctcggcgttgacgtggccccgcgcctcaagacgatcaaggtggcagagcccgccaagcgcggcgccggcatcaaggtgcccgacatcgccaccctggtcgacaagctcaagaacgaagcgaaggtcatttga

SEQ ID NO: 70 - protein, 249 aa, Unknown
  From metagenomic library of CO183
MKVLVPVKRVVDYNVKVRVKSDGTGVDIANVKMSMNPFDEIAVEEAVRLKEKGVVTEVIAVSCGVAQCQETLRTAMAIGADRGILVETAEELQPLAVAKLLKALVDKEQPGLIILGKQAIDDDANQTGQMLAALADLPQATFASKVEVAGDKVNVTREVDGGLETLSLTLPAVITTDLRLNEPRYVTLPNIMKAKKKQLDTVRPEDLGVDVAPRLKTIKVAEPAKRGAGIKVPDIATLVDKLKNEAKVI

SEQ ID NO: 71 - DNA, 933 bp, Unknown
  From metagenomic library of CO183
atgacctctctcgttattgcagaacacgacaacgccagcctcaagggcgccaccctcaacaccgtcaccgcagccgcccagtgcggcggtgacgtacacgtgctcgtcgccggccacaacgccggcgccgcagcacaagccgcctccagaatagctggcgttgccaaggtgatccacgccgacggcgccgccctggaacaaggcctggccgaaaacgtcgccgcccaggtgctccagatcgccggcaactacagccacatcctgttccccgccaccgccggtggcaagaacgtcgccccccgcgtggccgccaagctcgacgtggcgcagatcagcgaaatcagcaagatcgacagccccgacaccttcgagcgcccgatctacgccggcaacgccatcgccaccgtgcaaagcgcagatgccgtcaaggtcatcaccgtgcgcaccaccggctttgacgccgccgccgccaccggtggcagcgccgccgtggaaaccgtggctgctgccgctgccaacggcaagaccagcttcgtgggccgcgaagtgaccaagagcgaccgccccgaactgaccgccgccaagatcatcgtctccggtggccgtgcgctgggcagcaaggaaaagttcgacgaagtcatgacaccgctggccgacaagctgggcgccgctttgggtgccagccgcgcagcggtggacgcgggctacgcgcccaacgactggcaggtgggccagaccggcaagatcgtggcaccgcagctgtacatcgcagcgggcatctcgggtgccatccagcacctggcgggcatgaaggactccaaggtgatcgtggcgatcaacaaggaccctgaggcgccgatcttcagcgtggccgactacggcctggaggcggacctgttcacggccgtgccggaactggtcaaggccctgtaa

SEQ ID NO: 72 - protein, 310 aa, Unknown
  From metagenomic library of CO183
MTSLVIAEHDNASLKGATLNTVTAAAQCGGDVHVLVAGHNAGAAAQAASRIAGVAKVIHADGAALEQGLAENVAAQVLQIAGNYSHILFPATAGGKNVAPRVAAKLDVAQISEISKIDSPDTFERPIYAGNAIATVQSADAVKVITVRTTGFDAAAATGGSAAVETVAAAAANGKTSFVGREVTKSDRPELTAAKIIVSGGRALGSKEKFDEVMTPLADKLGAALGASRAAVDAGYAPNDWQVGQTGKIVAPQLYIAAGISGAIQHLAGMKDSKVIVAINKDPEAPIFSVADYGLEADLFTAVPELVKAL

SEQ ID NO: 73 - DNA, 648 bp, Unknown
  From metagenomic library of CO183
atgccccagaccctgaaaatcgacttcgtttccgacatctcgtgcccgtggtgcgccatcgggctgctgtcgctccagcgggccgctgcggcattgcagggagcggtggtgctggatctgcatttccagccgttcgagctcaatccggccatggcgcccgaggggcaggacatgggcgagcacctgcaggaaaaatacggcgccagccccgagcagagccagcgcacgcgcgaggccatcgtggcgcgcggcgctgcgttggggttcaccttccgcatggaccagcgcagccggatctacaacacgttcgatgcgcaccgcctgctgcactgggcgggcgaagaggggcggcagctggcgctcaagcaggccttgttcaaggcctacttcaccgaaggcgaaaacccgggcaaccacgaggttctggtgcgtctggcccgcgaggtggggctggacgccgatgcggcacgggacgtgctggcgtctgaccgttttgccgaggaagtgcgcgagcgcgagcagttctatcagcggcaaggcattcattcggtgcctgcggtcatcgtcaacgaccgccacctgatccagggcggccagccgcccgaggtcttcgagcaggcgctgcggcagattgctactgaaaaatga

SEQ ID NO: 74 - protein, 215 aa, Unknown
  From metagenomic library of CO183
MPQTLKIDFVSDISCPWCAIGLLSLQRAAAALQGAVVLDLHFQPFELNPAMAPEGQDMGEHLQEKYGASPEQSQRTREAIVARGAALGFTFRMDQRSRIYNTFDAHRLLHWAGEEGRQLALKQALFKAYFTEGENPGNHEVLVRLAREVGLDADAARDVLASDRFAEEVREREQFYQRQGIHSVPAVIVNDRHLIQGGQPPEVFEQALRQIATEK

SEQ ID NO: 75 - DNA, 5196 bp, Unknown
  From metagenomic library of CO183
gcccaggccgaacaggaacgtgaggccgagcagaaagcgcaggccgaccgcgaccgcgcagacttcaccctgaccggctccgaccggatctccgatgtggccgccgcgcgcgggcagaacgacatgttcggcgcccagcctgcaacccccgccagcaaagcgaaagaacaagcgaccaagctggccaagaagccaagccctgaaataccagccgttgaacccaagcccaccaaggtcgaagacttcggcgagaagctcggcggcgcccgcaaggacgagctgcgcggcgtgcgcgaacgcctggaaaacatggacgacaagagcattgcaaacagcaagctcagcgagctgtggccaaaggacgagattgaccgcatcgaagacacgttccacgcggctacctaccagactgtgcgggatttcattcctgcgaagcctcgggtttcctaccggattgccggctgggtgaacaaggtgaaggcggcgcgcgagctgctcggtgaactgtcgcgactgggcgccgaggcgaccgtcgccaagatgcgtgacttcagccctctaatgcggtccgtggctgacaagatcgagctgctgatgggcattgatcgctcgcagtgggggcgaatcggccgggtgagcatggcaaccggcagctacagccaggacggcaagatggtgccgggctcttgggcagaagtggagattgacggtcgaagcaagcacttctacggcaaggactctattgcccaggcgataaatgacgtccgccaggcgctgaatctcaactcagcgccggagaagaagatgcagttcgacgtctactcggacagggggaccggagaggtcttcatcgccaagagcggtgaccgagagacgcgccggcttgcgaccttcaagaccgtggccgaagccagggaccatatcgcaaacagccacgacagcctggttgcagcatgggacgccgtgaaaaaccgcgacaatgtgaccaaggcagacatgcggcgcagcctgaacgaggttcgcaccggtaccgatcaccgcggcggggcagacatcacgcctgaacagttcctcgagacgttcggcttcagaggggtcgagttcggtaactgggttgcgcagggcgacggcagcaagggccgacagggcatgctcaatgatgcctacgacgccttcatggatctggccgaagtggtcggcgtgccgccgaaggcgttgagccttgaggggcgcctgggcattggcttcgggtcacgtgggcgcggccgtgccagcgcacacttcgaaccgggcgccgtggtcatcaacctgaccaagaccaagggggcagggtcactagcgcatgagtggttccatgcggtcgacaactatttcgccggcaagcgaggggcgcgcgaggccgcaacggtgcgcgaagcggcgtacatcacgtatctccccgagccgatgctggtcaacaagaagtacccggcgcagcgcatgacacgcgccaagctggacatgtaccaggccaaccaccccaacgcacccatgtacgccgaggacaactggattccagatcccagtcatcccgaaggtgtcaggcccaaggtagagaaggcgttcgccgagctagtggagacgctggaccgctcgccgatggcaaagcgagccgctgtcctggacaaaggggcggctgatgggtactggtcgcgaatcatcgagcgcggtgctcgctcgttcgaaacctacgtgatcgccagactggcagaccgggggcatcgcaacgactacctggcgaacgtgcgtaccctcgaagaattctcccgcagccaggaccgctatccgtatctgacggccggcgagcaagaccctgtcaacgaggccttcgacaagctgttcgccaccatcgagacccgcgaaaccgattctggcgtgagcctctaccggctggatgacggggagcccggccaactgcaggcggacgccgttatgcaggcgcttgcgtcctcgccggagctcgccggcatcaaggtcgtgcagtcgttcgatgacttgccgctatcggcgcgcattcgagcgaagcgtgatggcgttgcgccggatgagctgcgcggcaccttcagcagcggcgcgacctatgtcgtcgccggtaaccatgccagcgttaccgacgcgctctataccgccgtgcacgaagaggttggccaccgcggcatccatggtctgctgggcgacaagctggacgccaccatggagcggctctatgccagccaggccgcaagcgccaagggccggcagcgcatcgcgcagatccgcgaggcctatgccaaggtgctgcagaagctcgacgcccgcaagcagcgcctgatgatcgccgaggaaatggtggcgctgctgatcgaggacggcgagcggcccactgccctgcagcgggtgctgtcgaagatacgcgagctgctgcgcgcactgattccgcaagtgccctggacctataccgacattctcgcgctgggcgagcaatcccgccgctggctgcgggacaaccaggccggtaccgccgatggcgagcggacgctctacgccctgggcgggaagcggcagcacacctccgaagcgttcagcgacctgactgccaagcagaaggatgcgctgaacaagatcgcgccgcgcaccgccaagcagcaggcgatcgactggttccgcgagcattccgatcgggcgctgctgaagatccgccaaggcattgtcgaccgctacgccgcgctgcgcgagctggacgaggccgcacatggcaaggatgtgcggaccaccgacattgccagcagcgcctgggtgctcgcgcgcatgtcttcggccgccagcggtgcactgcatgccatgctcaacaacgggcgcatctacctggatcagcagcagaaggtaatcgacattcaggacggcgaggcgctgggcttggggagcacgctggcgcggctggggtcggctgcggagatcgagcgcttcatgggctggatcgccggcaaccgctccgccaagctggcggccgagggccgggaaaatctgttcgacgctgccgagatcgacgcgctgcgcaccctcaaccgcggcacgaccgagcacggcaaggcgcgaggcgcgctctacgccgaggtgtttaccgagttccagcaataccgtgacgacgtgctggcgatcgccgagcagaccggggtgatcacgcccgaaagccgcgcgctctggcgcgacgagttctacgtgccgttctaccgggtgatgggcgacgacgctgccgccggcccgatggcatccaaggggctgactcgccaggaggcctacaagaagctcaagggcggcagccagaacctgaacgacctgctgcaaaacacgctgctgaacttcaaccacctgctgcaggccagcctgagaaaccaggccgccgcgcaagccatcgagaatgccgaacaactgggcatcgcacagccggtgaatgaggcggcgcgcgacaagaaggccagcaccttcgtgctgaaggcgggcgagaagcagtggtacaacatcgacgacccgctggtgttcgaggcgctgaattcgctcagcgacgccgggctgaacaacgccgcggtgcgcgcgatgagtttcttcaagcgcctgttcaccaacatgaccaccgttacgccgcagttcatcatcgccaacctgcttcgcgactcgatgtcggccacggccacctcgccggtgagcaagaatttcctgaagaacatcgcggtgggcggcaaggactggaccgatgcccgcaagcgggcccgcatgcttgccagtggcggcgctttcagcttcggccacatctatagcaacgacccggacgaggtgaaggcgcacctcacgcgcaaccttcgcagcgccaagctgatcgacggcccgaagctggtgccgcaggcgttgaaggcgggctgggacgcatggaatgcggtggccaacacggcagagaatgcgaaccgcgcggcgatctacgcgcagaacgagcagggcagcggcaagctggcggcagccttcgaggcgcgcgacctcatggacttctcgatgcacggcgcctggccggcggtgcgcttcctgattcgcgtggtgccgttcctgaatgcacgcctgcagggtctggacaagctgtaccgggcgggcgtcaagccgtcgctgctgactgcgttcggccagggcagtgcgtcggacaagcaggcggctgcccgcttcatgaccgtcgtcggtgcgctgtcgctggcgagcatggcgctgctgctggtcaacaacgacgacgaggagtaccgcaagctcgaggaatggcagaaggacacctactggttcgtccggctgggcggcaaagccttcttcatcccgaagccgttcgaggtcggcgccatcgcgaccatggccgagcgcctgctgcagcagggcatcgacgacaaggccaccggcaagctgttcgcgcagcgtctggggcacaccctgacgcagaccttctccttctcgccagtaccgcacatgttccagccggtgctggacgtctactcgaacgtggacgccttcacgggccgaccgatcgaatcagccggcatggatcgcctgagcaaggggctgcgcacccgagcgaccaccacggcgccggcgcgtgcggcgtcggccgtcagtcgcgccttcggcgatgagttcccgctggcggtatcaccgatccaggcggaccacctgatcgccggctacctggggcaggtcggcgcgtggggcgcgggcatggtcgacaccatgtggcgtgcagccaacggcgagagccagccggccaagcactggcatgaataccagccgattcgtcggttctaccgcgacctcgatacgccggcggcctacacccggtacagcaccctgttttacgaggggctgcgtgaggctggcaaggcttacgccgacgtgaaggagctgcaggaactcggccgcatggatgaggcgcgcgaggtgatcagcgagaagcgcgatctgctgggggcacgcaagcaactcaaccaggtgcagcgtcggctgaccgccatcaacggccgcatggatgccgtgcgcctgggcgaactcgacgcggacgccaagcgtcgggagctggatcgtctgttggtgatcaagaatcggctgacggaaatggccgggaagcggctggaggatatgcgcgtgaagcgctga

SEQ ID NO: 76 - protein, 1731 aa, Unknown
  From metagenomic library of CO183
AQAEQEREAEQKAQADRDRADFTLTGSDRISDVAAARGQNDMFGAQPATPASKAKEQATKLAKKPSPEIPAVEPKPTKVEDFGEKLGGARKDELRGVRERLENMDDKSIANSKLSELWPKDEIDRIEDTFHAATYQTVRDFIPAKPRVSYRIAGWVNKVKAARELLGELSRLGAEATVAKMRDFSPLMRSVADKIELLMGIDRSQWGRIGRVSMATGSYSQDGKMVPGSWAEVEIDGRSKHFYGKDSIAQAINDVRQALNLNSAPEKKMQFDVYSDRGTGEVFIAKSGDRETRRLATFKTVAEARDHIANSHDSLVAAWDAVKNRDNVTKADMRRSLNEVRTGTDHRGGADITPEQFLETFGFRGVEFGNWVAQGDGSKGRQGMLNDAYDAFMDLAEVVGVPPKALSLEGRLGIGFGSRGRGRASAHFEPGAVVINLTKTKGAGSLAHEWFHAVDNYFAGKRGAREAATVREAAYITYLPEPMLVNKKYPAQRMTRAKLDMYQANHPNAPMYAEDNWIPDPSHPEGVRPKVEKAFAELVETLDRSPMAKRAAVLDKGAADGYWSRIIERGARSFETYVIARLADRGHRNDYLANVRTLEEFSRSQDRYPYLTAGEQDPVNEAFDKLFATIETRETDSGVSLYRLDDGEPGQLQADAVMQALASSPELAGIKVVQSFDDLPLSARIRAKRDGVAPDELRGTFSSGATYVVAGNHASVTDALYTAVHEEVGHRGIHGLLGDKLDATMERLYASQAASAKGRQRIAQIREAYAKVLQKLDARKQRLMIAEEMVALLIEDGERPTALQRVLSKIRELLRALIPQVPWTYTDILALGEQSRRWLRDNQAGTADGERTLYALGGKRQHTSEAFSDLTAKQKDALNKIAPRTAKQQAIDWFREHSDRALLKIRQGIVDRYAALRELDEAAHGKDVRTTDIASSAWVLARMSSAASGALHAMLNNGRIYLDQQQKVIDIQDGEALGLGSTLARLGSAAEIERFMGWIAGNRSAKLAAEGRENLFDAAEIDALRTLNRGTTEHGKARGALYAEVFTEFQQYRDDVLAIAEQTGVITPESRALWRDEFYVPFYRVMGDDAAAGPMASKGLTRQEAYKKLKGGSQNLNDLLQNTLLNFNHLLQASLRNQAAAQAIENAEQLGIAQPVNEAARDKKASTFVLKAGEKQWYNIDDPLVFEALNSLSDAGLNNAAVRAMSFFKRLFTNMTTVTPQFIIANLLRDSMSATATSPVSKNFLKNIAVGGKDWTDARKRARMLASGGAFSFGHIYSNDPDEVKAHLTRNLRSAKLIDGPKLVPQALKAGWDAWNAVANTAENANRAAIYAQNEQGSGKLAAAFEARDLMDFSMHGAWPAVRFLIRVVPFLNARLQGLDKLYRAGVKPSLLTAFGQGSASDKQAAARFMTVVGALSLASMALLLVNNDDEEYRKLEEWQKDTYWFVRLGGKAFFIPKPFEVGAIATMAERLLQQGIDDKATGKLFAQRLGHTLTQTFSFSPVPHMFQPVLDVYSNVDAFTGRPIESAGMDRLSKGLRTRATTTAPARAASAVSRAFGDEFPLAVSPIQADHLIAGYLGQVGAWGAGMVDTMWRAANGESQPAKHWHEYQPIRRFYRDLDTPAAYTRYSTLFYEGLREAGKAYADVKELQELGRMDEAREVISEKRDLLGARKQLNQVQRRLTAINGRMDAVRLGELDADAKRRELDRLLVIKNRLTEMAGKRLEDMRVKR

SEQ ID NO: 77 - DNA, 44486 bp, Unknown
  From metagenomic library of CO182
ggtaccgacctgggcatcattcgtaccaaggccgagccgcaggcagacggctcctacaagatcagcggcaccaagatattcatcaccggcggcgagcatgacctgaccgagaacatcatccacctggtgctggccaagctgccggatgcgccagctggctcccgcggcatctcgttgttcctggtgccgaaggtgatggtcaacgaggacggcaccctgggtgagcgcaactcgctgtcctgcggttccatcgagcacaagatgggtatccaggcctcggcgacctgcgtgatgaacttcgacggtgccatcggctggatggtcggcgagccgaacaagggcctcgcagcgatgttcaccatgatgaactacgagcgtctgggcgtcggtattcagggcctgtcgactggcgagcgctcctatcagagcgccatcgagtatgcccgcgagcgtatccagagccgcgcaccgaccggaccgattgcgcaggacaaggcagccgatccgatcatcgtgcatccggatgtgcgccgcatgctgctgaccatgaaggcgttgaacgagggtggtcgcgcgttctccagttatgtcgcgctgcagctcgatatcgccaagttcagtgacgacgacgaggcgcgactgcgagccgaggcgcaggtggcgctgctgacaccggtagccaaggccttcctcactgacatggggctggaaaccacggtacatggccagcagattttcggcggccatggcttcatccgcgagtggggccaggagcagctggtgcgtgactgccgcattactcagatctacgagggcaccaacggcattcaagcgctggacctggttgggcgcaagatcgtcggcagtggtggcaccatgtatcaggccttcgtcgatgaaattcgcgcattcatcgctgatgccggtccggagctggcggagttcgccgagcccctcaaggctgccatggacaatctggatgagctgaccgcctgggttatcgatcaggccaaggtgaatccgaacgaaatcggcgccgcctcggtggagtacctgcacgtgttcggctacaccgcttatgcgtacatgtgggcacgcatggcggcggcggcattcgccaaacaggatgaaggcgacttctaccagagcaagctgggaaccgcgcgtttctactttgctcgcctgttgccgcgaattcattcgctgagcgcttcggtcaaggccggaagcgagtcgctgtacctgctcgacgctgctcaattctgagaagctgcggcttaatctaaaggcaatatgaaattatttggccatgacgcggaacgattaagccgcccttcaggtcataaaaaccgcaccatgtaagcctggacttacagtactgcatcaaggatgacgcgatgtaggaaaaggcttacaaggcgtgatgcacaatggctactacaggctcacaaggtctgacggtaatctactgcttaaggacgtggcgcatggaaagcgcaaatcaataaaacggaccacacagggagcggcgccaggatggcgcgcgatcatggatgtcaggattcagtctgcagagccccgcttcggcggggtttttcttttctgcttagttcttatgccagcagtcagccattcaggcggccttgcgaccgcttaggcttagcccgacttcccccggcatcaattaggcaggcacacaccggtcccaccaagcccgcaatatcccccaggattctttgccagatactgctggtgataggcctctgcgtagtagaacggcggtgcatcgtctacctcggtggtgatggccggaaagcccgctgcgcttagttgtcgctggaaacgttcacggcttgcctctgcctcgcggcgctgctgtgcatccatgcagtagatcgccgaacggtactggctgccgacatcgttaccctgccgcatcccctgggtcgggttgtgtgcctcccagaaaacgcgtagcagcgtgccgtagtcgatctgctgaggatcgaagaccaccagtaccgcctccgtatgcccggtaagcccggaacagacttcatcgtacgtcgggttcggggtcaggcctccggcatagccgacagccgttgtccacactcccggctgctcccagaaccggcgttccgctccccagaagcagcccatgccaaacaccgcctggcaaaggcctgctggaaagggtggctgcagcgggttgccattgacgtagtgggcgggggggaccggtacgggtgtcgagcggccgggcaaggcctgctcggcggtgggcagtgcctgtttgttgatcagaatctgcgagcgtagcgacatgcgagcctcgagcggggaaggtggctgacaagctaggctacaaaagcccgggagccagtgaaagcgccacggctaccacgcgtcgcagagttctgcgcaaacggctggcactcagcaccattgggggtagcggcgcagagcctcggtcaggatgttgccggggatcggcttgtcgaacaggtagccctgaccgatatcacagcgatgacgacgcaggaatttcagctgctccggtgtttcgattccttcagcgacgaccttcaggtgcagcttgcgggccatggcgatcactgccgaggtgatctccacgtcgtcctggttgcccgggatgtccttgataaagctgcgatcgatcttgatcacgtcgatggggaatttcttcaggtagctcagcgaggaataccccgtgccgaagtcgtccatggccagcgtcaggccgagcgccttgaggccgatcagctgctgtcgggtttcctcggttgcttcgagcaggaggctttctgtcagctccagctccagctgcgcggcgggaagttgctcttcgagcagaattgcggcgatcgtgccaagcagatccggatccgagaactgcttgggtgaaaggttgattgcgatctggggcgtgccaaggcctagcgctgacagggtgacgcccatccggcacgcctcccgcgcgacccacttgccgatcgggatgatcagcccggtttcttccgcgacgctgatgaactgatccgggcggatcatgcccttttccggatggttccagcgcagcagcgcttccagcccctgcagccggccggtatgcaggcatagcttgggctggtagaacacttccaactcgttctgcagcagcgcacggcgcaggttgttctcgacgaacagcttgtagttggcttcggcatgcagggcttcggtgaatatctgcacctggttcttgccgttcgccttggccttgtgcagcgcttgcccggcatgcttcatcagcgtttccgggtcacgcccgtgctggggcgagcacgccagccccagggacccgctgacgctgatcagctgcttgtcgacgaatagcggcttatcgaggatgcgcagcacctggtctgccaggcggacgccttcgtccagtcccttgtcatcgaacagcagggcgaactcgttgctggcaaagcgtgccagtacggcctgctggctgagtccgttgcgcagtcgccgggcaaggctggtgagcagcttgtcgccggtctggtggccgaggctgtcgttgatgcgcttgaagttgtcgatgtccaccagcaacaggcagagcctgggctcggccccggcggcaaaacgctcctcgatgctgcgaatgaagtacgggcgattgcccaggttggtcaggttgtcggtataggccagacgctcgatatgctggtgcgccagtttgctgcgggtgatgtcctcgtagatgccgatgtagtgggtcagcgcgccgtcttcattgaagaccttggagatggaaagctgaccccagtacggctcgaggttcttgcgccgggagcggaactcgccctgccagctgttgctgtgggcaagtaccgaagaggtgtcgaacagcagctcgccgaggttttccagagccttcagatcggccagacgctgaccgcgtacctcggctgaggaaaactggctgatgacggtgaatgccggattcacatattccacccggccttctcggtcgaccaggatgaaggcgctggcgctctgttccacggcgcgctggaacaggccgagcatatgggttgcgctgagccgctgctgattggccagcacctgcgcatactgatcggccagctcgccggcgaaggcgatctcgtcggcctgccatgcgcgcggtttgcctgtgtgttgcaggctgagaacgccgattacctccccaccgactcgaatgctggcgtccaggatcgagcgaacgccctgcgggcgatagataagctggtcaagttcgcaggtgcggtgatcctgggacacgtcctgcgcatcgacggcgcgaccgctctgcagcgcctgcaagtagcggggaaagggtgcgagttccagggctgagggcgtttcgtaatggtcgctgtcgagtcggtagcacgacactggctccaggcgcgtgccgtccagatgccagattgtcgcgcggttcagctcgtacacttcgcaggcggcctgagtgatcagctgtgccgcttccagttccggattggcggagccgtagcgatgccgagccagcctgacgatcaggctctgctgggtgcgcgaacgcagcatgtgctcgatgtgttcgtcctgggcttgctgatgttgctgcagcgccgtgcgcagtcgggcgttctgcgccctgagatcctgatccgattcaggctggcgtccgggcatcagatagcccctgagcagctcgcgaccatactgctggcaaacttcgccgagttcggtgatgtcctgcacgccgccaggcgtgtgcagtcgatagctgactgaatagtggctgcggcctgtcagctgttgctgaatctcttcgtgtagctggtgacgaacgctgggctccatcaggctggcgtagggggcgtcgaccagggagcaaaggtcgccggcggaaacaccgagataacgctcgcacgcgggatcgagaaacagcagtgtccagctggactcgttcaagcgctcgaaacgcagcatgccgagccgtgaaggcactggcaactgcgtcacaacctcggtcgccagacggctggcggcatcggtatgtattttcatcgagcggttggcttccagtatgctccacggagtcgggctggcctgtgctccaggcgccgttccagcgaaggacgatggctaaataatattaatttcggcaagggtgcatcatgcgacagggactgacaagtcggcttgcaaagttagtgatggtctcggttctctgcgtgatcggaacacctctgatcgcgagtgaagtggtggagttcggctcggatgagtcggctcgctatctcactgaattgaaaaagctttatctcaccagcagcgatcgcgaagcgctgctcgcgcatagtaacggattgctcgatacctacgcattgcgagcgggttatcaggttggccaggccaatccgcaggactttctctacgagctgagcgtggccactcctggcgagttgcgcatacgcgaggaagtccgcagcagcagcggcggtgttgccgtgcgtaaccgcagtctgtcggtattcgggcttgatccctacctgcaatatcagtgtcctgcgcaagggttcagttgttcgatcagcagccccatcgacggcctgcccttgctggtcattctgcgcgacccccagggtgccgaagagctggccaaggcactgtcttttctgattcgtaatctgcagaagggttgacgcagcagttggtgcgcgtgatccctgcacaatagaaaacgccgcatcttcttcagaggatgcggcgtttttcgtttggctcagccgttacagcagcagagtgcggatatccgccagcagctccgacagccgtttggtgaagcgtgcggcagcagccccgttgatcacacggtgatcgtaggacagcgagagcggcaacatcaggcgcggctcgaatgccttgccgtcccagactggctgcatcgtcgccttggataccccgagaatcgccacttccggcgcgttgacgatcggcgtgaagccggtgccgccaatgtggccaaggctggaaatggtgaagcaggcaccctgcatggcgtcaggcgaaagcttcttgctgcgcgctttctctgccagctcggccgcttcgccagccaactgcagcaaacttttctgatccacgttcttgatcaccgggaccatcaggccatccggcgtatccacggcgaagccgatgtgcacgtacttcttgcggatcagtgccttgccgcttggcgccagcgagctgttgaagtccggcagctccttgagcaggtgcgcacacgccttgagcaacaacggcagcacggtgagcttgacgccggccttctcggcggcagccttctgggagacgcggaaggcctccagttcggtgatgtcggccgattcgaactgggtcacgtgcggtacgttcagccagctgcggtgcaggttggctgcgccgatctgcatcaggcgcgacatcgcgacttcttcgacttcgccgaacttgctgaagtccacggccgggatcggcggaatgccggcaccgcccgaggcaccttcggccggagcctgcttggccttgtgcagcatgttcttgacgtaggcctggacatcttccttgagaatccggcccttgggaccggtggccggaacatcggccaggtcgacgccatactctcgcgcagtcatgcgtaccgccggcccggcgtgaaccttggtgccggccttgctcgggccgctgacggccggagccggcgtcgccgcggccttggcttccggtacgccctgcttgttcggtgcgacggcctgctgctgggaaacggcctcctgcggcctgctctccgcctttttcgctggcgccgagccctggaccttgagggtcaggatcaggtcgccagtcttggcatcgtcacccaccttgatcgacagcgactccaccacgcccgccttgggcgccggaatttccatgctggccttgtcggattccaaggtgatcagcgactggtccgcctcgacgctgtcgccggccttgatcatgacttcgatgaccttggcgcttccgctggaaccgatgtccggaatacgaacctcctccacggactcgcctgcagtttcggccggtgcttctgcggcctgctcggtcagtttctccttggccgggctttgtgcctggctggccggagcaccggccgctgccggcttgctcgaggcggtacctttgaggatcaggatcaggtcgccggtaccgacttcgtcgcccaccttgaccgaaatgctctcgactacgccagcggctggagaggggatctccatgctggccttgtcggactcgagagtgatcagcggttgctcggcggcgatggtatcgccggccttcactgaaatctcgatcacgctggccttgccggaggagccgatgtccggaacctttatttcctgcgactcgccttcctcggcggaggccgaaggatagtcatctcccggaggcgtaggtgcttcggcttcatcagtcgggccgccagtgccggcagcggcaggctcggccgcggcttgcgccggcgcttcgctgtcagttccttcttcgctttccagctcaagtagctcgtcaccttctttcaggcggtcgccgagcttgaccttcaaggccttcacgacgccagccttgggtgccgggatttccatgctggccttgtcggactccagcgtcaggatgctctggtccgcttcgatacggtcgccgaccttgacgaacaactcgattacttcaccctcaccgctgccgatgtcgggtacgcgtatggtttcactcacaataggttctcctgtgcgcacgcagcatcagcaatccagcggattgcgcttctcggggtcgataccgaactcggtgatggcattggccaccacggtgcgttcgatggcgccgcgatcggcgagtgcctgcagtgccgcgacggcaacccagcggcggtcgacttcgaagaagtcacgcagcttggcgcgcgagtcgctgcggccgaagccgtcagtgccgagcacctggtattcgcgcgacggaacccactgacgaatctgatcggcgaacagcttcatgtagtcggtcgaggccactaccgggccttcgcggccttccagacactgctcgacatagctcttgcgcggctcctctgtcgggtgcagacggttccagcggtcgaccgccaggccatcgcgacgcagctcgttgaagctggttacgctccagacgtcggcgccgacacccatcttggcgaggatgtccactgcagcacgcacttcacgcaggatggtgcccgagcccagcagctgtacacggtgcttgaagtcgcccttggcttcctctagcaggtacatgcccttgatgatgccgtcctcgacaccctgcggcatggccggctgctggtagttctcgttcatcacggtgatgtagtagtagacgctcttctgcagctccatcatttcgtgcatgccgtgatgcatgattaccgccagctcatagccgtaggtggggtcatagctgcggcagttggggatggtgctggcgaggatgtggctatgcccgtcctcgtgctgcaggccttcgccgttcagggtggtgcgtccggaggtgccaccgagcaggaaaccacgggtctgggcatcgccggccgcccaggccaagtcgccgatccgctggaagccgaacatcgaatagaagatgtagaccggcagcatcggctggttgtagttgctgtaggcggtacccgccgcgatgaacgaggagaacgcacctgcttcgttcaagccttcctgcaggatttgaccatccttctcttcgcggtaatacatcacctggtcgcggtcgaccggctcgtagagctgccccaccggggaatagatacccagctgacggaacatgccttccatgccgaaggtgcgcgcctcgtcggcgaggatcggcacgatgcgcttgccgagatccttgtccttcaccagctgcgacaggatccgaccgaacgccatggtggtggatatctcgcgatcaccggaaccgtcgagcactgctttgagggtgtccagcggcggtgtcgggatgctgaagctcttcggccggcgctgcggcagcgaaccaccgagtttctcgcggcacttgcgcaggtagcgcatctcggcgctgtcttcggctgggcggtagaacggcagttcttcgagctgcgaatcgttgaccgggatgtcgaagcggtcgcggaatttcttcaggctgtcgatatcgactttcttggtgttgtgggcgatgttcttcgcctcaccagcaccggtgccgtaccccttgatggtcttggccaggatgactgtcggctggcccttgtggttgaccgcctggtggtaggccgcatagaccttgtacggatcgtggccgccgcggttgagcttccagacttcctcgtcggacatgctctcgacacgcttgagcagctcagggtcagcaccgaagaaatgcttgcgcacataggcgccgtctttggccttgtagttctggtattcgccgtcgatggcttcgtccatgcggcgctgcatgcggccgtcttcgtcggcggcgaacagtgggtcccacaggcggccccagacgaccttgttgacgttccagttggcgcctttgaatacgccttccagctcctggatgatcttgctgttgccgcgtaccggaccgtccagacgctgcaggttgcagttgatgacgaacaccaggttgtcgagattttcacgaccggccagggaaatggcgccgagggtttccggctcgtcgcactcgccgtcaccgatgaagcaccagacgcgttgcttgcctttcggaatgaagccgcggttctccaggtacttcatgaagcgcgcctggtagatcgcagtgatcgggccgagacccatggacacggtcgggaactgccagaagtccggcatcaggtgcgggtgcgggtagctcgacaggcccttgccatcgacttcctggcggaagttgagcatctggtcttcgctcaggcggccttcgaggaaggcgcgggcgtaaatgccaggggaggcatgcccctgatagtagatcaggtcgccgccgtgctcttccgttggggcctggaagaaatagttgaaaccgatgtcgtagagggtcgcgctggaagcgaaggtggagatgtgcccacccagatccggatccttgaggttggcgcgcatcaccatggccagtgcgttccagcggaccagggatcgaatacggcgctccatgaacaggtcgcctggcatcttggcttcgcgggtgacggggatggtattgcggtacggcgtggtgatgccgtagggcaggggggtgccgctacgtgtggccagttcacccatccgggtcatcaggtagtgagcgcggtcttcaccctcgcggtcgaggacggactcgagggcgtccagccattcctgggtttcgacgggatcgagatcttgcatggcttgctccatggcggaaaggcttccagaatcggttgcctgttcgcgaccggctttgtgggccggtgcgtgtaatgttcttggacgagtgccgggggtaggaccgggcgtctgtagttttactacaaaatgacgtcgggatcagccccctgaaatactctttagtagtaaaactacagatcagcggcgctggcattttcctgagaaaggcatctgcgaggctctgaatcgcgcggtttcactgtgttgctgtgaaggaaacctcaatgagtctgccatcgctggttgcattgccgccctcgcttctgccttttgtcagtcgtgccgaagagtcgttcctcgctgctgccggcagcctgtcggatgccattgcggcacgttgccgcgtctggctggtggagcagcgcgaggcgttcggccgggtctgtgcggcgagcgacttcgtcagcgaacaggttagtcgagatccgcagatgctgctgcagctggccgagctgggctggctggacagatcgctcgcgccggtcgagatgcgtgacgccctgagcgagcaggtcgccgcgtgcgacagcgaggatgccctggcgctgaccctgcgccgcttccggacccgccagcaggtgcggatcatctggcgcgacctgacccgtcaggccgaccttgctgaaacctgtcgcgacctttccgatctcgccgacgcttcggtcgatctggcgtatcactggctgtacacacgccattgcgagcagttcggcgtacccaccgggcgtcgcagcggcaacccgcaacacatggtcatccttggcatgggcaagctgggcgcccacgagctgaatctgtcctcggacatcgacctgatcttcgggtaccccgaggggggcgaaaccgtgggcgccaagcgctcgctggacaatcaggagttcttcgtccggctcggtcagcggctgatcaagtcgctggacgccatcaccgtcgatggcttcgtcttccgcgtcgatatgcgcctacgcccgtacggttcgtccggtccgctggtctacagcttcaacgcgctggaacagtactaccaggaccaggggcgtgactgggagcgctacgcgatgatcaaggcgcgtgtcatcggtggcgaccagcaggccggcaaggagctgctggaaatgctgcggccgttcgtctatcggcgctaccttgatttctccgccatcgaagcgctgcgcaccatgaagcagctgatccagcaggaagtgcggcgcaagggcatggcttcgaatatcaagctgggtgccggtggcatccgcgaggtggagttcatcgcccaggcgtttcagctgattcacggcgggcgcgatctcagcctgcagcagcggccgttgctcaaggtgctggctaccctggaaggtcagggctatctgccgggtgcggcggtgaaggagctgcgcgaaggctatgagtttctgcgctataccgagcatgcgctgcaggccatcgccgatcgccagacgcagatgctgccggagactgaggtcgactgcgcgcgggtcgccttcatgctcggtttcgacagctggcaggccttccacgagcagctgttgcactggcgtgggcgtatcgactggcattttcaccaggttatcgccgacccggacgaggacgagaatgccgaaggcgaggcgctggtcggcggcgagtggctgccgctgtgggagcaggattgggacgaagagttcgcctgtcgacagctgtccgaagccgggttccgtgatggtcaggttgcctgtcagcgcctcgccgcactgcgtaatgccagtcaggtcaggaccatgcagcgtctcggtcgcgagcgtctggatgccttcattcctcgtctgctggcgcaggctgtcgagcaggacgacccggatctggtgctcgaacgcgtgctgccattggtcgaggcggtggcccggcgttcggcctatctcgtattgctgaccgaaaatcccggcgcgctgcagcgcttgctcgaactctgcgcggccagcccgtgggtcgccgagcagatcgcgcggttcccgttgctgctcgacgaattgctcaatgctgggcggctgtacagcccaccgctggcgccggagctggctgccgagttgcgtgagcggctgatgcgtattcccgaggatgacctcgagcagcagatggaggcgctgcgtcatttcaagctggcgcatcgcctgcgcgtcgcagcctcggagatcgccgggacgctgccgttgatgaaggtcagcgactacctgacctggctggcggaggccattctgcaggaagtgctgaccctggcctggcgccacacggttgcgcgtcatggtcagccgcagcgcagcgacggcacgctctgcgatccggccttcgtcatcgtcggttacggcaaggtcggcgggatcgagctcggtcacggttccgacctggacctggtgttcatccatgacggcgaccctgccgccgagaccaatggcgccaagcccatcgacaccgcgcagttctttacccgtctcggtcagcgcatcattcatctgctgaccacccagaccacctccggccagctgtacgaggtggacatgcgcctgcgtccgtccggcgcttctgggctgctggtcagctccctcggcgccttcgagcgctaccagggtcaggaagcctggacctgggagcaccaggcgctggtgcgtgcgcgggtgctggttggctgtccgcagctgaccgccgacttcgaacgggtgcgcgccggtgtgctcggtcgtgaacgtgatctggatgcgctgcgtcgtgaagtcagcgacatgcgcgcgaagatgcgcgacaacctcgggacccgcgcgacacatgcggggactgccgagcaagccttcgacggcgcggccgagttcaatctcaagcaggacgccggtggtatcgtggatatcgaatttatggtgcaatacgcggctttggcgtggtcgcaccagcatcccgaactgctgcgctataccgataacatccgcattctcgatgggttggagcaggccgggttgatgaccggcgatgaggttcggctgctgcaggatgcctacaaggcctaccgcgccgcagcgcaccggcaatcactgcagaagcagcccggagtggtgagtggggatcaattccacgacgagcgccgcgctgtcatgcgtatctggcgtgagttgggcctaagctgagcccctcgtcgggctactgggcaaattcgaattctgaggagctggcaacgatgtcgatggccgatcgtgatggcgtcatctggtatgacggcgaactggtgcagtggcgtgatgcgaccacccatgtgctgacccataccctgcactacggcatgggcgtattcgaaggcgtacgcgcctacaacaccccggacggcacggcgatcttccgcctgcaggcgcacaccgaccgcctgttcgattcggcacacatcatgaacatgccgatgccgtactcgaaggaagagatcaacgaagcgacccgcgccgcagtgcgcgagaacaacctggaaagcgcctacatccgcccgatggtgttctacggaagcgaaggcatgggcctgcgcgccagcggcctgaaagtgcacgtgatcgtcgccgcctggcactggggcgcctacatgggcgacgaggcgctggaactgggcatcaaggtgcgcaccagctccttcacccgtcaccacgtcaacatcaccatgacccgcgccaagtccaacggtgcctacatcaactcgatgctggccctgcaggaagccatttccggtggcgctgacgaagcgttgatgctggatcctgaaggctacgtggccgaaggttcgggcgagaacatcttcatcatcaaggatggcgtgatctacaccccggaagtgaccgcctgcctgaatggcatcactcgtggcaccgtgctgaccctggccgccgagcacggcctgaaggtggtcgagaaacgcatcacccgcgacgaggtctatatcgccgacgaagccttcttcaccggaactgccgcagaggtgacgccgattcgcgaagtcgatggccgcgccatcggcatcggtcgtcgtggcccagtgaccgaaaagttgcagaaggcctacttcgatctggtctccggcaagaccgctgctcatgccgaatggcggacactggtcaagtaagcgcaggcgccaagctgcacgcggccgatggttcgccgcttgcagcttgaggctcgtggcttgaagctgcccttatgaatattctgattgtgggacccagctgggttggcgacatggtgatggcgcagacgttgttcgtctgcctgaaacagcgccatcccgactgccagatcgacgtgctggcacccgagtggagccggccgattctcgagcgcatgcccgaggtgcgtcaggcgctgagctttccggtcgggcacggcgtgctcgacatggcgacccggcgcaaggtggcgcagagcctgcgtggtcagtatgagcaggcgatcctcttgcccaattcgttgaagtcggcgctggtgccgttcttcgccggtattcccaagcgcaccggctggcgcggcgaaatgcgcttcggcctgctcaacgacatgcgcaagctcgacaaacaacgctatccgctgatgatcgaacgcttcatggcgctggcgttcgagccgggcgccgagttgcccagaccgtatccgaacccttcgctgcgtatcgaccccgtgactcgcgatgtggcattggcacgtttcagtctgagcctggatcgtccggtactggcgctgtgtccgggcgccgagttcggcgagtccaagcgctggccggccgagcacttcgccaaggtcgccgagctgaagattcgcgagggctggcaggtctggctgttcggctcgaaaaacgaccacccggtgggcgaggaaatcctcgcgcgattgattcctgggttgcgcgaagaggcggtgaacctggccggcgagaccagcctggccgaggccatcgatctgctctcctgcgctgacgcagtggtgtccaacgactccgggctgatgcacgtctccgccgcgctgggccggcctctggctgcagtctatggctcgacgtcaccggccttcaccccgccgctttccgagcaggtcgaggttgtgcggctgggtctcgactgcagcccctgttttgaacgcacctgccgcttcggccacaacaactgcatgcgcgagctgaagccgcgcgcggtgatcgaggcgctggatcgtctggccccgcagtcggtcgaggtgcgctgattgaaggtcctgctggtcaagacctcgtcgttgggcgatgtcgtgcataccctgccggcgctgaccgatgcgcagcgggcgctgcctggcatccagttcgactgggtcgtggaggagggcttcgccgaaatcccggcctggcatccagcggtggcgcaggtgattccggtggcgattcgtcgctggcgcaaacatccgatcaataccctgcgcagcggcgagtggcgacgcttcaaggcgcgcctgcgcgaaagtcgttatgacttggtgatcgatgcccagggcttgctcaagagcgcctggctgacccgctacgtcaaggcgccggtcgcagggttggatcacgattcggcccgcgagccgctggcgacacgcttctatgatcggtgctatgccgtgccgcgtgagcagcatgcgctggagcgggtgcgtcagctgttcgctcaggcgctcggttacccgctgccgcaggatgttgccgactacggcctgaatcgcgagcaaatggccgctcccagcgatcagccgtatctgctgtttctgcacggcaccacttggccgagcaagcactggccggaaacctactggcgcgaactggccgaacgcatgagcgatttcggctgggcgatccgcctgccgtggggcaatgccgaagagaaggcgcgggccgaacgcatcgtcagcggtgtggccaacgccgcggtgctgccgaagctcaatctggccggtgttgcacgggtcatcgctggtgcgcgggcttgtgtcgcagtggataccggcctcggtcatctggccgcggcgctggatgtgccgagcatttcgctttatggtccgaccctgcccgggcgggtcggcgcctatgggcgctcgcaggtgcacctgtgcgccggcggaccgaacgccggtcgcggtgatcggcacaagccctgtttcgacgatctgcgccccgagcgtgtcgtcaccgaactgaaagccctgctgcgggccccggagtccgtctgatgcaactggcattcattctttacaagtatttccccttcggcgggctgcagcgcgatttcatgcgcattgccctcgaatgtcagcgtcgcggccattcaatccgcgtctacgcgatgatctgggaaggtggcgtgcccgaaggcttcgaggtgctgatcgcgccggtcaaggcgctgttcaaccacacccgcaacgagcgtttcactgcctgggtcgaggccgatctggccaaacggccggtcgaccgggtgatcggctttaacaagatgccgggactcgatgtgtattacgccgccgacccctgcttcgaggacaaggcgcagaccctgcgcaatccgatctaccgccgctggggtcgctacaagcacttcgccgagtacgagcgcgcggtgtttgcgcccgaggcgaagaccgaaatcctgatgatctccgaggtgcagcagccgctgttcgtcaaacactacggtacgcccgccgaacgctttcacctattgccgccgggcatcgcccaggatcgccgcgcgccggccaatgctgcgcaaatccgtaccgagtttcgcgaggaattcgaggtgcggcccgaggagctgctgctggtgcagatcggttccggtttcaagaccaagggtctggaccgcagcctcaaggcgctcgccgcattgccgcgcgaactgagtcagcgcacccggctgctggtgatcggccaggatgatcccaagccgttcaagctgcaggccaagacgctgggcgtttccggcatggtcgaattcctcaaggggcgcagcgatatcccgcgtttcctgctcggcgccgatctgctgatccacccagcctacaacgagaacaccggtaccgtactgctggaagctctggtcgccgggctgccggtgctggtcaccgatgtatgtggctatgcgcactacattaccgacgccgactgcggtcgcgtggtacccagccccttcgagcagcaggtgctcgaccagatgctggcgcagatgctggccgatgatcagcaacgcgcggtctggagtcgcagtgctctgacgttcgccggcacggcggacctttattcgatgccgcagaaggcggcagacgtgattctcggggcaagcgcatgagcgctacagctcggtcagcgccctgccgattggcggaggctccatgcgcctgatgctattggagccgttcaaaagcctctggcatggcaaggatcccttcgtcgaggtcgagcgcctgcagggccaggtctaccgcgaactggagggccggcgcaccctgcgcaccgaggtcaatgggcgcggatacttcgtcaagatccatcgtggtatcggctggggtgagatagccaagaatctgctgacggccaaggcgcccgtacttggcgccggccaggagtggcgagccattcagcggctgcacgaagcgggggtgccgaccatgaccgcggttgcctatggcgagcgtggcggcaatccggcaacgcagcattcgttcatcatcacagaagaattggcgcccaccattagcctggaggacttctcggcaaactggctggaacaaccgccgccgccagcactaaagcgcgcactgattgccgaagtcgcgcgcatggccggcaccatgcaccgcgccggcgtcaaccaccgcgatttttacatctgtcactttctgctgcataccgacaagccggtgacggcgagcgatttccgcctgtcgctgatcgatctgcaccgtgcccagactcgcacccagacgccgcggcgctggcgcgacaaggacctagccgggctgtacttctcggcactcgaaatcggcctgacccgtggtgacaagctgcgttttttacgtgattacttccggcggccgctgcgtgaaatccgacgcgacgaggcttccttgctggcctggctgcagcgcagggcggaaaaattgctggaccgcaagctgcgctatggagacgcgctttgatggcgggctggaccctcgacccggcctacgctgccttgaacgcggctttcggcagcctagagagagtgttcgagctgcagggtgagcggcttacgcaggatcctctctccgaggtcatccgggtcgaactcaacgatgtacgttattacgttaagcggtattccggcgccggcaagggcttgcgtcgtttcattgggcgcccgcgggtcaaggctgagtggcacaatctgatgctctttcgtcgttggggcattccgacggcgccgatcgtggcttacggcatggagcggcgcggcggggcattcctacgaggcgcgcttataacccgggagctggagcagacggacgatctggcgttgctggcggccaaccacgatgctcgtcttcgcgatccccgctgggtacaggaagtcagcctgcagctggcgcgttcgacgcgagcgatgcatgaccggggctttgctcacaacgatctcaagtggcgcaatctgttggtcgacccgcagcgccgcctttacctgatcgactgtccgaccggcgcgttctggcgcggtccgtttctacagcggcgcatcatcaaggatctggcctgtctggacaaggttgccaagtaccagctcagccgaacccagcgcctgtggttctatctgcagtactgccagcgcaggcggctggtagacaaggacaagtcgcgcattcggcagattctgaattatttccaggggcgggaatgaaggacttcattgcgcaggctgatcgggcggcgctcgagcgacatggtctggcgggttttgatgcactctggtcggtgcagctgactgctgtggatgagcccaatgtcgagcgcggtggctggagcagtgtcttccggctcgagctcgatgactcggcgttctacctcaagcggcagagcgatcatctgactcgcacactggcgcacccctttggcgagccaaccttcgcccgggagtttcgcaatatccgtcgttatgcgcggcttggcgtgccggcgctgcaggccagcttcttcgggcagcgcaaggtcggcggcgaacggcgcgctgttctgctgacgcgtgcgctggatggatggatggatttggacgaattgctgaagcgatggccggagcttggcgaatcaaatcaccaagcgatcctcgtcgcagtcggcggattggcgcgtacgttgcatcaggccggacagatgcatagctgcttctatcccaagcacatcttcctgcgtgagcagggcggttgttggcaggcctgcctgatcgatctggagaaaacccgccctctattgttggggcggcgcgaccgggtcaaggaccttgagccgctcgtgcggcgtgcaagcgttatcggtaagcaaggcgtgcggcatttgctggaggcctatctggacgactctcgcctggtcgagccatggctgcggcagctgcatcagcggcgcgaagccaaggaggcccgttaatgaggttggtcgagctggccggagccgggcgagagcctgcctgcccgttgcaagtcgagttaccggatggggcgagtctgcatgtcgatctttggctgcgcatcctgcccgggcagcgctatgtcggccgcgcgctttggaacggtcgccaggtactggccaagcttatggtgggtggcaaggcgcagcgtcaccatcggcgcgaagtggctggcgcacagctgctcgcggatcagcagctgccaacacctgccctggttgctcaggattggcgggagggcgagggcggctggttgctgttcgactggctcgattcctgcgaaagcctgtgggaagtctggtgctccgttgaggcggaacctggcctgtcggatgcccagcgcgacgtgctcggcgaggcgcttgaactgatcgccaggatgcatgcgcaaggcctttggcaggcggatctgcatctggacaacctgctgagagccgccgggcagctctatgtggtcgacggcggcggcgtaaaggcagagacgcccgggcagccgttgtcgcgcgagcgggtgctggagaacctcggcgttttcttcgcccagctaccggcagagatcgagccgttcatagaagaactgctggtgcactatctgctcgccaacagcgagcatgcgttgccgctggaagcgctgctgaaggaaatccgcaggacgcgcgcctggcgcctgaacgactacctgaaaaaggtggcgcgcaattgcagcctcttcagcgcgcacattggcccgttcggcgcgcaagtggttcggcgtgacgaggcgcctgccttgcagccggtactggctgatccggacgctttcatttcccgggggcggctgtacaagaccggtggcgcagccaccgttgcgcaacgcgagctggacgaccggccattgctgatcaaacggtacaacatcaagaatccgctgcattggctcaagcgcttctggcgccctagtcgcgcctggcatagttgggttgaaggcaatcgcctcgactttctcgggatcgctactccacgtttgctagccgtcatcgagcgccgctggctgtggatgcgtgggccggcgtggctgattaccgaattgctgcgcggagaagatataattgcgcgttttcagccgtacctgggtggctgtcctccagaggaagagctggtcgccctggaccggctgttcgcagcactgattcgcgagcgcatcagtcacggcgatctcaaggggcacaacctgttctgggagcatgaccgctggtcgctgatcgacctggatgccgtgcaacaacatggcagcgatgccagctttgcccgggcatatgccaaggaccgcgcgcggttcctgcgcaactggccgaccgacagcgccctgtaccggctgcttgaccaacgtttacccgcggtgcccggcaccagcatcgaagattaagaggcaatacccgtggcattgacgattctcggcctttccggcgccctcagtcatgatccttccgccgccctttacattgacgggaagctgattgccgccgttgaagaagagcgctttgtgcgtgacaagcatgccaagaaccgcatgccgtacgaatccgccaaattctgccttgagcaggccggcatcaaaccggcggacgtcgacgtggtggcgattccgttcgcacccatcagcatcttcgagaaggcccgctggcactatgccaagcgctactggtacgcgccggatcgtgcgctggatgccattctcatgggcaaccgccgctactaccggtacaagaagcgcattgagtggtgcctccagcagctcggcttcgacttgaagaaggtcaagctgcagccggttgagcatcatctggcccacgcctccagcgcctaccattgctcgggattcaccgagaagaccgccattctcggcatcgacggtaagggtgagtacgccaccacgttcttcggctggggcgagaacggcaagattcacaagatcaaagagttctacgacccggattccttaggcggactgtacggagcgatcaccgagtacctcggtttcgagatgctcgatggcgaattcaaggtgatgggcatggcgccctacggcgacgccgccaagtatgatttttcccgcctggcgacgtttgagaacggcgagctgaccatcaacaccgattacgccaacgtcatcggctttcgtcgctacaaggagaagggcaagggctactacttctcgccgaagctgatcgaatggctgggccccaagcgggaaggtgacatcgccgacgacccctacatccattacgcggccgccatgcaggcgctgttcgaaaagcttgccctgcagatgatggactactacctgggcgacatcatccgcgagactggcaagattgccttcgccggcggttgcgcgctgaacgtgaagctcaaccagaagatcatcgcccgtgacgacgtcaaggagctgttcgttcagccggcctccggtgacgctggtaccgcggttggtgctgcggcctatgtctcggtgcagcgcggcgtgccggtggagaagatggaacacgtctatctcggcccgtcttattccaacgaagacgtcatcgctgcctgtgccaagcatccaaaaaagccggtgttcaagcagatcaccaacacccctgagcgcattgccaggatcatggcggacggaaaccccgtggcctggttccaagggcgcatggagttcggcccgcgcgcccttggcggccgttcgatcatcggctgtccgagcgtgccgggcgtggccgatcgcatcaacgagcagatcaagttccgcgagcgctggagacccttctgcccgtccatgctcgataccgttgcatcgcagatgctcaaggtcgatcaccccagcccgttcatgaccttcaccttcgaggtcaacgagggctggaaggagcgggttggtgaagtggttcacgaggatggcacgtcgcgcgcccaagtactggagcgccggcacaatccgcgctggtacgacctgatgctggaactcgaaaagctgaccggtaacggcgtgtcgctgaacacctcgctgaaccgccgcggcgagccgatgatctgctcgccgaccgatgcgctgaacatgttctatggctcggatctgcagtacctgatcatggaggacatcctcgtggtcaaggagggcaagggttggtatgagcacatctgatttgctgatcagtatcgtcattccagcctacaactatgcgaagactttgcctcgcgcggtcgagtccgtaatcgctcagttaactgagcgtagcgagctgttggtaatcgatgacggctcgaccgacgagacacctgcggtacttgccgatctgcaagtcaaacatgctggacttttccgtgctatccgaaagcccaacggcggggcttcctcggtccgtaatcgcggcatagtagaggccacagggacgtatctggtgtttctcgatgccgatgacgagttggcgccggatgccctgaggttgttgagtgagcacctcgcgcaacatccgcaaacacgcatggtaatcggcggccattgggctgtctggcccgatggcaagcgccgtgaacatctgccagcggcgcttcctgatgaacggctggaacggttgcgtggatatctattggacaagaccatcggccttgccaacggggcgtccgccattcatcgcgacgtttttcggctcggaaactaccccgaaagctttagaaatgccgaggacattccggtcttcagtcaagcactcgcaaactttgagtgcacggtgcttgccgcgcccatggcgctgatctacaagcacgatgacagcatgaggcacgacatcgagcaggattgtgctgttgggcttgccgtcgtcgaggagatattcgacaaggggcgggtgcctgctgccatgtcgtcgttacgcagagcattcaaggctcagcgttgcctttcgctgtttcgtgggcttttgagcgcagggcggtttgccgaggcgcgtggaatgtatcggcaagcgatcagcaatgattggcgggtaattttcaagatgtcctatacccgcaaagcgttgcggctttggttgagcggaagacactgagcgtgggacctcccatgaacgtggcgttgcgccagctgcgtgacttcgtagtcagcgcaccattgcgccgcgggaaggggcgattggcgtcctggcgactgcgctgtcggttggcaggtagggggctgttggctttctttttgtccataggtcggcgtatcccagcaacgtcatgcgacgttttgctgattcatccttcgcgtaaatcatacgaacaaggccgaaaaggcgctttgctacaggcgttgcgggctaacggtctccacgtcgaggaatttgtcgaagagtcggatggcgtactgattcgcgctcggcagttcgtcagacctgccaagcccgtcccgttcctgctgtattggcatgctgcgcatgcggcgttcttgctgcgacgttatcgggccaaggtggtgttggccgagcgaaacggctggataattccaagtttcatcaaggcgctacgcaccgagggcatgcgagtaatgcatctggcgcattccgtgccgtctgggcagtccagtcgctatgactatttcgattacgactactatctgatgtttggcagaagttcttacgactacctttcttcgcttggggaggcttttggtgagtgccgcgccgtgtatgcggggccatattttctgacagacgaaaagagaaccgtttggcacgagagtaataacagaaggacgccacgtttgttgtttctcggttctggcccggattacgagcataccgaaacctatcaacaatattgcaggtgggtagtgacttggctcgaacagcatcaggatgcaaggatctcagtgaaactccacccccgtggacaaggctatccttggctggactatgcagcgggttccgagcgaatcgctctcttgtctgcagatgagacgctcgagcaatgtgccgggcacttcgatctagtactgtgtggttataccaatgctgtcttggatgttgcccgtgccggagttcctttcgtgcttcttgggcagggcgaggactatttttcggtcgcgcgattcgggctgccaagagtcgtcgctgaggcgcagttggcgtcctgtatcgaaacagctctgtctgaaccgggaaaaataaaagagcgcttgttggagtttctgaactaccacatctgtcacgcagacaagccgcttagcacccttatcggcagcgtgcgggtggtagcgaacgccgcggagcctgttggtattcaactgtctgctccgccccaaaaatattaataagcatacttatgaaagtcgtatttctcggattggctaagcatcaaatcaactacttcagtggcctacttgaaaattcagagttgactggcactgtcgtcacgcctgcgacattgcctcttccatccgtctgcggattacaacaggcgctacgtcgggtggagtggagtcggttggtgcaagagaagtgcaccgagcgggcgacgaaaggtcgttatcacggcgccttatatcgacttctgctgaggttggagatgttggtgatggctcttcgtttcggccggttgctgcgagaagagaggccgggcgcggtagcggtgtggaacggtagccaccgttattgcgcattgctcacaagcatgtgtgaagctggcgtgctgcgattgcatttcgagaacggactgcttccaggtactacaacccttgaccctcagggcgtgaattatcgcaactccgtgccgagggatgccgctttctataggaactatgcagagcgataccctggccggctacgtagtgctggctcggtcgcgctggttccacgagaagcgaagcgtcaaagccagtccgttgagctacctagcagctatatattcattccctttcaagatgattgggatacccagattcggctgtattcgccctggataagcggcatgcgcgagcttttctcctttgccgaactggtcgcgcagcgcagcgggagagtcgtggttctgaaagagcatccatcgagccgggtaaagtatccggatctagccaggcgcgcctcagacagggtcattttcgcgaacggcaacgcgacgcaggaattgatcgagaaggctgactgtgtcgttacgataaattcgacagtgggccttgagagcattctcttggcgaagcccgtgctggttctgggggaagctttctatgcgatcgaaggcattgcggccagcgcgcgaaatgcgacagaggctctcgctttactggaaaagctgccggcctggggcctaagcgaagacctgcgacaggcattcataagttatcttcgagatgaatactgcgtgccgggccgttggcaggatgccgtagcggagcactacgcggcggtagcgacgaaaattgaggctttggcagcatgattctaccttggtcgctccctacctccctgcgggtgttgctcgcgattggactatatctgcagctcgcagggatttgctttattccagacggcagtcgttacgccaccatcaccaacctaactctgttcgcccccgcactcttcgcgctccttttcaggcaatcatggccgtcgttcaataagactgcgtttggcatgttgttggccctgtgcgggtgggttgctttcgttgctgtgtttaacgaggggagcgttggcacaccttggagatggctgcggctgcttctatatgtaggtctctacgttgtggccattggtcttgtgatgcaaagcaggaacatctggcgagtcctgcttctggcggtggttggtactgcgggactatttgcatggctcagcttgtttcaagcgctcttcatcgataaccgaggcttcggtttcagagagttcaggctagattcttgggctggccacacaatggcagattttaagaaccctatcgtgtccgccttgtactttggcgtggcagcggtcatggcgctttgcatgtctttacgcgaaaaaggttggctcagagtattgcccctgctggcgttccttggagcctctacgtactgctatttcacttattcgcgaggggtatgggttggcctgttggctgcggttatggcttgtctggcagtttcgctcactgcgcggcagtttcgcttgctgttatgcggcattctcccgctagccattgccgggatctttcttctcgaaacggccggcggaatagacgccagttatcgagacgaaatcttctggcaatggtggtcaaagatcggttcattctggtggtggggggccggcgcgggagcagaaccgaatatctgtattgaaggagccgggcgctgtttcaaccaagcgcacagcctctatctgcagttcttctacgagtatgggattcccggcctgctgctcctgctggcgttgatcgccattcttttgctaggtgggtggcgttatcgttctgggcaaagcttcgcgcctctgggattggcgcttatggtgtttgtcattttcgtgtccgttgcaaactactatgtgatttttctgcgtccgggtgtgttctggattgttttttggttgccggccgcaatcctcctgcacgaacactcgggggggcgagcggccagaagcccgatgatgtcgatgttcaacagtatgaagcggtactggtgcctggagattctaggcgcgagtcaaaaagaattttcatggcgcagactcaggcagaaatataagagaagcaatcgctatgcttacttgttctggtttcgtcttgcctacgtacttcacgctgaaggcggtcgtttctggaagcggcgagccaaaatgctcaacgagcgaataagccgtaagtacaacgtcgaaatcatgctgggcgcgacggtcggcgaggggttatggattgcgcacccgtcgggcatcgtgattagtgcttatgcccgaatcgggaagaatttcaaggtttggcagggttgtaccgtcggcataaaaggcggagcgggagaaaaatcgatacacataggtgataatgtcagtctttgtgtcaattcatgtgtaattggcgatgttatctcgatttccgataatgtggtggtcggcgcgatgaccttggtgaataaggatattccaaagcctgggacctatgttaataagcgcgtactagagcgtttcggttttagtgacgtgccgttgtcgggtagttaatcgcttcgctttcccccccgtgctacagagtgtctccgtagagcttgagaagttcctgtatagggaacttctcaagcttctttcgttttaggtggttgtgtaagtgatcgaaatttcgtctgattaagtttgggccaagcgggctgcgcttcttctgcaggtcgagaacgtcaatcaggccaagcgagccattcggaagcaggataatgttgccaatatgcaacgatcgaaagtagatgcctttttggtgcaagctttttataaagttagctagcgcaggcaagtgttgtttgatcagattaggatcggcgcgaaaaatggattctattgaggaacctggcaagggctggtataggcagccgctcaggcctgcgctcttgtcaatccaaaaggtgtcgatggcttcagggacgtggaagccagcgccacgcagtatggcaaggttcctagcgaaccgttctgcatagggaaacaggcgcgccagaaaggggcgtcggcgagtatagaagatctttagaaaactcccgtttactagctccagaactttgggcccgcgcgcatccttttccagcaccttgccttccgccagccagttttccagctcctgcgctgttacaatcctcatcttgttcctctagccagtcgtatggggcttgccgaatggccaattctacccagcaatccagtgtgacggtgtatctgcgattgctgcactacgtctttccctatttagggctgtttgcgatcagtcttcttggttttctgatttttgcgtcgacccagccgatgctcggctacatgctgaaattctttgttgatggtttgaacaacccagacgccagtttgtttgctcaggtcccgcatctcaacgaagtaccatggctggctcagctcaagctattgcaggccgtcccactgctgatcatcttcatcgcgcttatgcagggcatcggttcgttcctcggcaatttttttcttgcaaaggtttcgctagggctggtgcatgacctgcggctggcactgttcaacaacatgctgacactccccaatcgctattttgacagccacaactccgggcatctgatctcgcggatcacatacaacgtgaccatggtcaccggcgcggcgaccgatgcgatcaaggttgtggtgcgcgagggcatgacagtgattttcctgttcgccacgctgctgtggatgaactggaagctcactctggtgatgctggcgatactgccagtgatcggtttcatggtgtcgagcgccagcaagaaattccgcaagcagagcaagaagattcagcttgcgatgggcgacgtgacccatgtcgcttcggaaaccatacagggctatcgcgtggttcgtagcttcggaggcgagccttacgagcggaatcgtttcctggctgcgagctcggagaacaccgccaagcagttgcgtatggtcaagacgaatgccgtttacacaccgagtctgcaactggtcatttacagcgccatggcagtgctgatgttccttgtgttgttgctgcgtggcgacgcgtctgctggcgatctggtcgcctacatcacgctggccgggttgctgccaaaaccgatccgtcagctctcggaagtcagctccaccatccagaagggcgtggccggggcggaaagtatcttcgagcagctcgacgaggagccagaagtcgatcggggcacgcttgagcgcgaagccgtcagcggccatctcgaagtgcgcaacctcgatttcgtctatccaggtaccgacaagcgtgtgctgcatgacatcagcttcaccatcgagcccgggcagatggtcgcgctggtaggtcgatccggcagcggcaaatccacgctggcgaatctgatcccacgcttctatcaccatgaggcaggtcagatactgctcgacggtgcagatgtcgagtcctacacgttgcgcaatctgcgtcggcacattgcgctggtgactcagcaagtgacgctgttcaacgatacggtggccaataacatcgcttacggcgatctggccggcgcgccgctggacgacatacgccgcgcggcccgcgatgcgtacgccgatgagttcatcgagcagatgccggagggttatcaaaccatggtcggcgaaaacggcgtgctgctatccggcggtcagcgtcaacgcctggcgatcgctcgtgcgttgttgaagaactcgccggtgctgattctggacgaagccacttcggcgctggataccgagtccgagcggcacatccagggcgcgctggatcatgtcatgctgggccgcaccacgctggtcatcgcgcaccgtttgagcaccatcgagaaggccgaccagattctggtgatggagcaggggcgcatcgtcgagcgcggtacccacgccgagctgctggccgcgaacggcgcctacgccaggctccacgccacgcagttcaaggatgaagtgcccgaagagcaggaatcctgatgttgcagttcctgcagagctggcgcgagcgtggctggcgcgttatcgacgcatcgacgtattccgaggtctggcagcgctacggtggcagcgttgcgactcaccctgaggtcatcgagcggctggctgggctcgctggtattccagtgcgctatctgggctgggaaaagcaaggtgagctgattgcggcggttccctgctgggggcgacatctggcgctttccaaggatgtgctgaaaaagactggcaagcgcggcctgttcgatatgggcaacgcggagatcgttctgccggttgccgagctggcagcggtgccggtacgccagcgtatgcgctacgtgtccgagctgaatgctactgcgatcagcacgttgcgcgagcagccggagggcttggcgctggcgcgcgagccggaggagtattcgaagaagttccgctacaaccagcgtcgcgagcagcgcttgctggaagaggccggcggtgtgctgcgaccgatgctggatttctcgccgaccgagcaggctgcgatgtatgccgatctgttcctgcgccgctggggtttcgaggcgcctggtaagggccatctgcaagaggtctttgcactattgcgcgagttcatgaccggctcggtggtcctgctcgatgagcagcccatcgccgtccaggtgctttaccgggtcgaggcaccgaagtgggtgtcgatcgagtacatcaatggcggtgtcgatccgcagcagcgggatttcagccctggcagcgtcctcagcttcgtcaatacccagacggcctgggccgaggcacgggcgttgggcaaaccgctgcgttattccttcggtcgtgcggaccgagagtacaaggaccgctggtgtaaccgcgtcccggtctaccaggtgtgagtcatgagtgcacgcaagcagcaattgcttaagcgtcatcgcaagcacaagcgcatcgcgctgctcgtcgcgctcgttgcgctgttgctgattggtgcgctggtcaactggtggctgataccgctattggtggttctcggctggatcgcccatgaggcatggttcgctgatcatctgttctaccggccgcaggacgactaccgctacgcctttcctgaagatgccaagcgctacccggtgcgcatcgagggcggccgtctggttctgcctgacggcttcgacgctgcagatacgctgattcttgaggtcaacctgaaggccagctggctagggcgctggcgcgacccgcaggtacggatcggtgaggaccgtcaggatttcgagcgcggtgtcgcagggcggcgttacctcaacctttccggtcagcacgagctgctcgtccagggcagcctggacgttcgagggcgtttctgccagctctcgaacgatgcgaccctctatgcgatgcgcaatccggactacgccgagcgccggatcctgatcattgccccccacgctgacgatgcagagctggccgcgttcggcttgtacagccgagctcgcgacgtcgccatcgttacactgactcagggcgagattgaggcgaacagctaccagcgcctgggtttggatctgcctgctgcggcccgtttgaaggggcgcctgcgcagttgggacagccttgcaataccgctctgggggggagtgccgcagtctcgttgtgtgcagctcggctattactgcctgcaactgccggccatggcggaggagccggaacgcgcgtttggctcacgagagtcgggcgagcaggacatccgcagcgttcgtcagaacaaccccttcgcgctgccggccgatgtggacggcgtgcccacctgggacaatctgcaagccgatttgcgcgcgctgctcgcgcatttccgccctgaagtggtggtcacgccgcacccggaactcgatccgcactccgaccatgtcgctgccacgcgagcactctatcaggcgatggaggagggcgactggctgccggaaacgctgctgctctatgccaaccacctgcacgataatgatcgctggccgatgggcccggctgatggtggtattgcgttgccgcctgccatcgagccgctgccggcggaccgcctgtggagccctctgctggatgccgacgcgcggctgaacaaggcaatggcgttggccatgcagcacgatttgcaggggccactgccactgaaaaagcgcctgcgccgtttgctccaggcagccctcgccggccggcgctggccgcgcaccggcgaggacgaattctttcgcaaagcggtgcgccgccatgagctgttctgggttcgccacctctagcaaggcgccccaccggcaggctgccaatgcctgcatgttatgatcgccgccgttttctcttcttcaccggagcccccatgaagctgtccatgccccgtttcgaccaagccgccgttctggtggtcggtgacgtcatgctcgatcgttactggcatggcggtacgtcgcggatctcgcctgaggcgccggtaccggtggtcaaggtcgagcagatcgaggatcggcccggtggcgcggccaacgtggcgctgaacatcgcggcactgggtgcgcctgctgcgctggtgggtgtgaccggtgaagatgaagcgcgccagagcctggccgacagccttgcggcggcgggcgtgcaggcgcacttccagcgcattgaggaccagccgacgatcgtcaagctgcgggtgatgagtcgccatcagcagctgttgcgcatggatttcgaagagccgttcgataccgatcctgccgcactgctggccgacgtggagggcttgctggctggggtcaaggtgctggtgctgtcggattacggcaagggtgcgttgaagaaccatcaggcactgatccaggctgcgcgccgtcgcggcattccggtcctcgccgaccccaagggcaaggattttgaaatctaccgcggcgcttcgttgattacgccgaacctgggcgagttcgaggcgatcgtcgggcattgtgccgatgaggctgagttggtgagcaagggcgccgagctgatggcgactctcgatcttgaggctctgctggtcacccgcggcgagcacggcatgaccctgctgcgtcccgaccaggcgccgctgcacctgccggctcgtgcccgtgaagtgttcgacgtgaccggcgccggagataccgtcatttcgactctggcagcggccatcgctgccggtgagcagctgccgcaggccgtggcactggccaacctggccgccggtatcgtggtcggcaagctgggtaccgcctgtatcagcgcacccgagttgcgccgagccgtgcagcgcgaagagggctccgagcgcggtgtaatgaccgtcgaacaactgctcactgcggtcgaggatgcacgggcagagggcgagaaaatcgtcttcaccaatggctgtttcgacatcctgcacgctggccatgtgacctatctggaacaggctcgggcgcaaggtgatcgtctggtcgtggcagtcaacgacgacggctcggtcagccgcctgaaggggccggggcggccgatcaactcggtggatcgccgcatggcggtgctcgccggtctggaagcggtggattgggtggtgtgcttttcggaggacacgccggaaaacctgctggcccaggtccgccccgatgtgctggtcaagggcggcgactatggcgtcgatcaggtggtcggtgccgagttggtcaaggcgtacggtggcgtggtgaaggtgttggggctggtggaaaacagctcgaccacagccatcgtcgagaagatccgcagccgctgagtctattggatacgcctaccgcgtatcgtcagtaggtggatagccgcttttcgcggctacccactacgcgttaacgggcggccgccatcggccgtgccgcccaccaatcccgccagcgaacgcgctcgtcgcgcaccacccagccttcctgcggcgcaaagctttccgatagccacaggccgcgagtgttcaccggggtgaactggccattgcgcagttgcagcagctgatcctgcggctggccctgatgcagcggtatcaggtagatgtcgggccggctgcgctccaggcgcgcaatcaattgcccgtcttccaagcgttcgtcgacatgaaacaggctcagctgtcgcgtctctttcggtagctccatgcgcatgtcatataccagctgcaacgatgcggtcggcaggtgtacataggcgcgaggacgctccatcagcaccatattgccgcactgcaccgggcgcgttgcgccggattgcgaggcgagcttgaagtgcaccgcctctcggtagtgcaggctggcctggtacggagtgggcagccaggtatcgccgaaacgcccggcaagccagccttcaggggtttccagcaggcattcttcggcgatctcctggatggcggtaagcagcggcaggttcagctcatgcgccgggatgtagccggaaatcagcttgagcacaacgtcaccacggtccggccgctgctgacggaccagcacccagtattcgcggccctgccagctcatggtcagacgcactgaaacgccgagattggccagttcgatggcaaaatggcccggatcggacacctccaccgggcggcggcgctcgatcacttcgctgaagttcaacggccggcccagactctggtagctcaggttgtcctggctggcctcgacgtagagaggcagggtcttgaatgcggcagggctcttgcgcaccagaactcttggcattcggtttctccttgcggcgaagaaagtaaccgcgcggcatcagcgtaatgcgcttccgcgcagcggatgaacgttgccgccaggaccgtttcagttgctggtcagaacggcagcagcagtccgtacgttagccgtcaaatgctgcggattgatagtgccgatgatcgcgccactgaccccggggtggccgaacagcaactcgaagcttcggcgcaccgggtcttcacctggcttgaggcaggcgtggccgctggcaagcgccttcttgatcagaatgcccttgccgtgggctgcagcgtagtcgagcactggtcgctcggcctgctcgttgaggttgtaggtgaccatcgcgcagtcgccctgttgcagcgccagcagtccgccgtccacggtcttgccggagaggccgtagccgagaatcttgccctcgcgcttgagctcggcgagggtctggtagacctcggcgtgctgcaggatgtccagatcgttgccatcggaatgcaccagcaccagctcgatgcgatcggtgcgcagacgctttaggctgcgttcgaccgaaaagcgcgtgtgcgcggcggaaaagtcgaagcgcgactggccgttctcgaattcctcaccgaccttgctgacgatcacccactcatcgcgctggccagcaagcagcgggccgagccgctcttcgctgacgccgtaggccggggcggtatcgatcaggttgatgcccagatcgcgggccagagccagcagctggcgagcctgggcatcgtcgggaatggcgaaaccgctgggatacttcacaccctggtcacgtcctagcttcaccgttcccagacccagcggcgagatgttcaggccggtgctgcccagcgggcggtgcaactcatgcagcgttgcgttcatggcagcagcccttcccagaacggcccggtcaacggtggtcgcggcagttccggtagcgcaggatgctcgatggggcgaatgccgtcgcgggcgagagcggcttcgacgcggtcggaaaagtccggtgacagcgccagcttggtcggccagccgaccagcaggcggccctgctcggcgagaaaggcgttgtccggacgggcgagggccgattgcgccggctcggcgcggtcgatgcgtagcgtggcccagtgcgctgcggacaggtcgatccagggtaccagctcggccagttccttcttcgccgcggcgatctggctggcttcgtcgcgcgccacgccatcggcttcggccagatcgccgcccaggtaccagacccactcgccgtctgccgccggatggctggtcacggtgattcgcggtttggtgccgccgcccagacaatgggcatagagcggcttgagcgtcggcgccttgacgatgaccatgtgcagcggacggcgctgcatggccggttgctgcaggccgagcgtcgtgagcagctcggccgtcccgccaccggcactgaagacgatgcgctgagcgcggatctcgcggccgtcgacgcgcagaccgaccagctcgtcgccatcgagcagcggttcgacctgctggccggcgagcaggctgtcgccggccagctcggccaggcgggcgatcagactgggcacatcgagcaccagttcgctgaggcggtagaccttgcctttgaatttcgggtgttgcagagcgggtggcagttcgtcgcccttgacctgaccaacccgcgagcgcaccgccttgctggcgaagaagctggtgaggttgccggccagcgtgccgggcgaccagaggtaatgcgcatcggacagcaggcgcacgccgctgagatccagctcgcccttgccttcaagagcctcgcgccagcgccgtggcatgtcggcgatggcttcggatgcgccggtgagggcgccgctcaaggcgtatttggtaccgccatgaatgatgccctgggacttcacgctctgcccgccacccagcgttcccttgtccaccagcaacgtggcaaaaccttgcctgcgcaggcgcgcgttgagccagaggccggcgacgccgccgccaacgatcaggacatcggtgctgagggattcaggcatgtgcaggcctcatacggggaaacggacgcgcagtataactgcatgcagttcgcggggcgctcagtggccggtgctgccggagaacagctgaatgaccaccacgccagcgatgatcagggccataccgagcactgccggcaggtctaggtgctggcgatagatcagcgccgcagcgatgctgaccagcacgatgcccaggcccgcccagatggcgtaggcgatccccaccggaatggtcttcaccaccagcgccagcatccagaaggacaagctatagccacaaatcaccagcaacaggggcagcgggcggctgaagccggccagggctttcatcgaggtggtggcgatcacttcggcgcagatggcgatggtcaggtaaacgtaaccggacatgggaaatcctgatcgtgggctggaggaggtcaacttcgttcggtcgcgtcctcgtcaactagttcgccagccgtggcgattgtggctcgccggcaggcggcttgctaagctccgcgcccatgaatcgcaccctctataccctgctgttccacctcggcctgccgctggtatttctgcgcctgctctggcgcgcctggcgcgcgccggcctactcccgtcgtatcggcgaacgtttcgcctttggtttgccgccgcttcgtccgggtggcatctgggtgcatgcggtgtcggtcggcgagagcatcgccgcggcgccgatgatccgcgaactgatggtgcgctatccgcagctgccgatcaccgtcacctgcatgacaccgaccggctcggagcgcatccaggcactgttcggcgacagcgtgcagcactgctatctgccctatgacctgccctgggcggcggcgcgctttcttgagcgcgcgcggccgaagctggcggtggtgatggagaccgaactctggcccaaccatatccatcagtgtgcacgccgcggcattccggtagcgctggccaatgcgcgtttgtccgcgcgctcggcccgcggctacgcgcgcttcgcccgtctgactgcgccgatgctggctaagctgagcctgattgccgtgcagaccgaggctgaagccgaacgttttcgccagctcggtgcgcgcgatgagtgcgtggaggtgaccggatcgatcaagttcgatctgaccatcgacccggcactgctggagcgtgccagtaaattgcgccagcagtgggcggcgcaggaacggccattgtggatcgccgccagtacacacgccggcgaggacgagatcattctggctgcgcatcgccagctgctcagcaaccatccgcaggcgctgctgatcctggtgcccaggcacccggagcgcttcgcctcggtgtacgagtcggcggtcagggatgggtttgtcgccgtgcggcgctcgacgggggaggcagtcggtgccgacactcaggtattggttggcgacaccatgggcgagctgctgtttctctacgcgctggcggatatcgccttcgttggcggcagtctggtgcccaacggcgggcacaacctcctcgagcccgcagcgctgggcaagccggtgctcagcggcccgcacctgttcaactttctcgagatatcggcgcagttgcgcgctgctggcgccctgcgtgaagtgcaggatgccgcgcaactggcgcaggtggtcagcgaactctggggcgatccagccggggcccaggcgatgcgcgatgccggtctcggcgtgctcaaggccaatcagggcgctctggagcggttgctggcggggttggggcggctgctcgggtaatttggccgggcggattcggcgtcaggccgccaggttcggcgcgggatgcttttgatggttttcccgccccgggcagctcaacgctagagttttagccgttgggctctcgcacaggtgcatgaaggtatcgctacgctgcccggccgatcatgcacctgtttctcctccgtcgctcagtaatcgatccgcaccggctggccgatggtctgcggcaggtccggtggcaggaagtcggtgtccgggttgtagtcgggcttcaggtacgccgccagctgctgcagatcgtccggattgagcgtgcccgcggcctgtttcaggcgcaagttgtcgagaatgtagtcgtagcgggcgttgttgtagtcgcgcacagcgccgtacagccggcgctgagtgtcgagcacgtcgacgatgttgcgcgtgccgacctgatagccgatctccgtcgcctccagcgcgctctgattggagatgatcgattgccggcgagcctcgacctgctcgatatcggtgttaaccgctcggtgcagattgcgtgtggattcgaccacctggcggcgcaggctctcgcgctgctgctcgctctggctgagctggtaataggcctcgcgactctgcgaagtggtcaggccgccgctgtagatcgggatattcagctgcaggccaatgctgcgctgctcgacgtcaccggtgtagcgcggcatgtcgaagcccgggatgctctggctgttgctgaagcccagcgcatcgttgtcgcccttgcgataggacgccaccgcatcgagcgtcggtgcatggccggagcggcgctggcgcagggtttcttccgctgcggtcaccgcgtaattgaccgccagcaggttgaggttctgccgtgttgcggtatcgacccacgccttggcctcgttcggcaccggggccagcaccggcagggtgtggcggatgccttcgagggcgatgtattcgcggttggtcagtgtgtacaacgcctggaaggcgtcctcgacctggcgctgggcgatggagcggttggcccgggcggtatcgaagcctgcctgggcttcgagcacgtcggtcttgtccgacaggccgacctcgaagcgctcgttggcctggtcgagctggcgcttgaatgcagcctcctcggccttcactgccgccaggttgtcttgtgcgcgcagcacggcgaagtaggcctgggcgctctgcaggatcaggtcctgttcggtgatggagtattcgattgcggcctgctcgctcacggcttccgcggccttgagctggaaccagcgatcggcacggaagatcggctggctcagcgttgcctggtagacggtaccgctgcgcgacagtgaggtggagcccctgctggtatcgacgtccgtttcggtatcgctcagctcggcgccggcgctgaggttaggcagcagcccggcccgcgcctgcggcacgatttcctggcgtgcgcgaaactgcgcacgcgctgcagccaggtcggcgttgttgttgacggcttgctgatagacgctgaccagatcggtcttgctggcgagcgggacggtttcctgtgcccaggctgcttcggcggtgagggaagccacggcgagagccagggggagtctgcgcagcatgttgggtccatcctgaatagagctgaggggcaaggctaagcggcggctgacggggggtcaaggcgcgtgtgcgaggcaatgtcagatgccggttgcggccggccggaatgaccgaacggtcgactagtttcgcccttggcatggcgttcgtactgggtcttgattagactcgatagcgttcttgtcggggtgccttgaagcgaaggctgagatcggaaagttccggatcccgttgaacctgatcaggttaaggcctgcgtagggaacaagatgtgctcgccagtcgttcggccagctctctcagcgccagttgcggcgcacccgatgcccttgccatccgtgttttcaggttcgctccgacaattctctaggagccagcctgatgcgtgtagaacaacagaacctgagtgaatccgcccaggtcgaccagcagtcgatccaacccttcccgcgttcgcagaaaatctatgtgcagggttcgcgcccggatatccgcgtaccgatgcgcgagatcagcctggacgtgacgcccacggacttcggcggcgagatcaacgctccggtcaccgtgtacgacacctccggcccctataccgatccgaacgtgcagatcgacgtacgcaagggcctggccgatgtgcgcagtgcctggatcgaggagcgcggcgataccgagaagctgccggggttgacctccgagttcggccagcgtcgcctgaacgacgccgagctgaccgccatgcgctttgcccatgtacgtcatccgcggcgggccaagccggggcataacgtcagccagatgcactatgcgcgcaagggcatcatcacgcccgagatggaatacgttgccatccgcgagaacatgaaactgaccgaagctcgagaggctgggttgctcaaggatcagcacgccgggcatagcttcggcgcctcgatccccaaggagatcacgccggaattcgtgcgtgaagaagtggcccgcggtcgcgccatcatcccggccaacatcaatcacaccgaactcgagccgatgatcatcggccgcaacttcctggtgaagatcaacggcaacatcggcaactcggcgctgggttcttcgatcgaagaggaagtggccaagctgacctggggcatccgctggggttcggacacggtgatggacctttccaccggcaagcacatccacgaaacccgcgaatggatcatccgcaactcgcccgtgccgatcggcaccgtgcccatttatcaggcgctggagaaggtcaacggcgtggccgaggacctgacctgggagctgttccgcgacacgctgatcgagcaggctgaacagggcgtggactacttcaccatccacgccggggtgctgctgcgctacgtgccgctgacggccaagcgcgtgaccggcatcgtctcgcgcggcggttcgatcatggccaagtggtgcctggcgcatcaccaggagaacttcctctacacgaacttcgaggaaatctgcgagatcatgaaggcctacgacgtcagcttctcgctgggtgacggcctgcgtccgggctcgatcgctgacgccaacgatgcggcgcagttcggcgagctggaaaccctcggcgagctgaccaagatcgcctggaaacacgatgtgcagtgcatgatcgaaggcccgggtcacgtgccgatgcacatgatcaaggagaacatggacaagcagctggaatgctgcgacgaggcgccgttctacaccctgggcccgctgaccaccgacatcgcgccgggatacgaccacatcaccagcggcatcggtgcggcgatgatcggctggttcggctgcgcgatgctctgctacgtcacgccgaaggagcaccttggtctgccgaacaaggatgatgtgaagaccggcatcatcacctacaagatcgccgcgcacgccgccgacctcgccaagggtcatccgggcgcgcagattcgcgacaacgccctgtccaaggcgcgcttcgagttccgctgggaagaccagttcaacctcggcctcgacccggacaccgcgcgtgccttccacgacgagacgctgccgaaggaatcggccaaggtggcgtgggatccccgggtaccgagctcgaattcgccctatagtgagtcgtattacaattcactggccgtcgttttacaacgtcgtgactgggaaaaccctggcgttacccaacttaatcgccttgcagcacatccccctttcgccagctggcgtaatagcgaagaggcccgcaccgatcgcccttcccaacagttgcgcagctgaatggcgaatggcgcctgatgcggtattttctccttacgcatctgtgcggtatttcacaccgcatatggtgcactctcagtacaatctgctctgatgccgcatagttaagccagccccgacacccgccaacacccgctgacgcgaaccccttgcggccgcatcgaatataacttcgtataatgtatgctatacgaagttattagcgatgagctcggacttccattgttcattccacggacaaaaacagagaaaggaaacgacagaggccaaaaagctcgctttcagcacctgtcgtttcctttcttttcagagggtattttaaataaaaacattaagttatgacgaagaagaacggaaacgccttaaaccggaaaattttcataaatagcgaaaacccgcgaggtcgccgccccgtaacctgtcggatcaccggaaaggacccgtaaagtgataatgattatcatctacatatcacaacgtgcgtggaggccatcaaaccacgtcaaataatcaattatgacgcaggtatcgtattaattgatctgcatcaacttaacgtaaaagcaacttcagacaatacaaatcagcgacactgaatacggggcaacctcatgtccgagctcgcgagctcgtcgacagcgacacacttgcatcggatgcagcccggttaacgtgccggcacggcctgggtaaccaggtattttgtccacataaccgtgcgcaaaatgttgtggataagcaggacacagcagcaatccacagcaggcatacaaccgcacaccgaggttactccgttctacaggttacgacgacatgtcaatacttgcccttgacaggcattgatggaatcgtagtctcacgctgatagtctgatcgacaatacaagtgggaccgtggtcccagaccgataatcagaccgacaacacgagtgggatcgtggtcccagactaataatcagaccgacgatacgagtgggaccgtggtcccag

SEQ ID NO: 78 - DNA, 17928 bp, Unknown
  From metagenomic library of CO182
tcacgtcgctgcgggaagccggggcccatccgaggcgaagacctccgctagggtttcagcaagggcctggtgactgaaaggctttgtcaatactcgatatcgggactcaggtgaaagccgcgtcgtaaaaccggtggcgaggaggatgtggatcttcggatagaggcgatgcacttcgtccgccagcccaaccccgtcaagtcttccgggcatgacgacgtccgacagcagtacgtcaatcgctggccgaggctcacctgccaatcgagccagcgctgcatcagccgaggagacttcatcgacctggtaacccaactcctcgagcattcccaccatcgcttcgcgcacttcggggtcgtcatcgaccaaaagaatgcgcgccgggtgggtaggaggaaacgatgtgccttgatcctgttgcccagtgctgggcccatgttctatgcggggcaatagcaagcacacgcgtgtgcctttgtcgatctcgctcgtgatcgttactgccccaccggactggcgcgcgaaaccgtagacctgcgccaggcccagtccagtgccttcaccgatgggtttggtggtgaaaaagggctcgaatacgcgcgcctgtatctcctgactcatgccgcatcccgaatcctcgacgtccacgcacaggtaaggcccaggcgccaggcctaatggattgtcacgcggcagggtgggctgatgcaggccgatgaccaggcggcccccttcaggcattgcatcgcgcgcgttgatggcaagattgaggatagccagctcgcattgcacggggtcgatgaccgtcggccacgagccgtcgggcaggttcatctccaacgtcacccgattggggagggcaccggtcagcaactcgtgcatgccgagaatcgagtttcgtaggtcaacctgttctacgtcggcggtgcggcttctgctgaatgccatcaactggcgtgtgagacgagtcgcccgatctaccgaacgctggcaaccctcgattgcacgcgcggccctcggatgggatgtcagcatctcggccagctgcaaacccatggtcatgctttgcagcagattattgaactcatgggagatcccggctgtgaggttacccaacgcttcgagcttttgtccctgcaacaatgcctggtgagagcgctccgcctgtgcaacggcgtcctttacccgttcagccatctgctggctggaacggtgaatcgtgacgctggcttgggccataacctgtgcagttcggtcggtctcgcccatgcccgttatcggcggactgaacacttcacctcgcgccagggcagtggcagcctcatcgagctgcgcaagtggccgggtgatggtgcgtccgactgcaatcgccgccatgaccgcaaggaacaacacgacaagaatgccgatcaccatggtccccgttggcgcaagcacgctggctagcaattcatcgcgaggaatggcaaccagtgccgtccagcccgatgccggggcatggctgaagaacgttgtcacctgcacgccatcgcgcgttatcgataacaccctcccgtcgttacctggcgaggcacgcagctggtcgatgaaatcggcgctcgccggtttaccgatatgcttgtccggatcacgtgtgcgggcgactaccgtattgccttgatccaaaatcacaccgagccacttcttcggcaaggcttgttgctccagaagtgcgccgatacctgcaaccgggaactccatgacaaggaaatacaccgcctcgccgtcgcgaataaccggccggcggattgcaatgctgtgagttccggtctcccgatcactaaacgatggactcacctcaacttccgttgtggtcgtgaactttggataactaggcaggctcggtaagggtgtgccaaacggatagtcggtatcggccaacgcgacgccgttcgtatcgaagatcgttacgctcgcgcctaccgcatgcttggtttgctgaagacgctcgtgaaaggttcgtacgttgcctttgatgatggtcggagaggcggcgagcgtcgtaacgatcgttgcataccgcgccagctcgcgatccacggcgagcgcgacggcacgggaaacctctttcatcccctggtcaacctgcgccgactgcgcacggtagaccgaataggtgccatacaacgcaaaagcgagtgccggggcgataacggcgatgactagccaaactagacgggagcgaatcgacacgggcgagctacctgttgggacacggcgcgtgttgccgggcgcgccgagcatagcgcacgtcatgcaaaagtacgcggacctagaccatcggcgaggttcgaaaccgttagcagtgttttccaatggatacagtccagatgcagggtcaccagccattgcgttagcatcggttcgcttatgaccgccccaaaaggggcggtttcaaggaagacaataagaggagaaagggatggcatgttctgccacgggtgaggcacgcgtcgcggtactcgtcgattgcgacaacgtcacgcccgagattctcgagcatgcgctgcgcgtgatcgcccaattcggccgagtcgtcctgcgccggggctatggcaaccatggcacgcttgccaaccgctggcaggaagcgctggtgcgccttgcctttacgccgtgcctgcagtaccagtacgccgcaggcaagaacacggccgatatcgcccttgccctcgatgcgctcgaggcgctcttcgaccagcgtgccgacaccttctgcctggtcaccagcgattcggactttgcctacctgtgccgcaagcttcgggagcggggcgcgaccgtatgcatcgtgggcgaggcgaagactccggatgcgctgagaaacgccagcgacgagttcttcgaatggactcgaccggcgccagagccggagcaggcggtcgaatcgccggaacgtgcgccgaagatcgcctgtccagcgaagaccgaatccaaggtcgaaccgccgcgaccgccggccaagcggcgcccgcgcttcgtggtcgatgccgtcgcgctgatggtggcgggcacgaacgaaggaaaggtgacgctcagcgccctgggcggatatctcaagcgtgccgatcccgcgttctcgcccagcgcgtacgggcactcgggattgctgaacatggtcaagacctacgaccttctcaatgccgtccaggaaactggcggacactggagcgtgagtctggccaaggacgtcggcatggacgaatcgtccgcgctgcactgagcaatgcttctgccgggcgatcacaagaactcggacttcagcccgcctacaaggagacccgtcatggccatcttcgttgagcgcagattcgaaatgggcgatacggacgtcgttgcccgtttttccactccgacgaaggctacgggtggcgaattccaatgccactacgaactggactggccggatcatgaggaccgaggctacgcctctggcgaagatggcgttcaggcgctcatgctagcgatgaagaaggtgcacttcgcgctcgtcaagagcgatgcttaccggaagggccaactgaccttgtggggccagttggatctcgacctgccgcccacctggggcactgggcctttgtatttcgcggcgaatcgctccggcgaaacaccgggcgattattcctgatggcgctggttggcgggcgagaccgctcagtcgccgcgtcaggcagcgggccccggccggggaggataatgttcagaggagggggctcgggcgggacaagcgtggtaccggctcatgtggttgcgtagcgctcaggcatgcgtctcgcgggtaaggacgtcgaccacccattggttgatgctcttgttcgccagttcggccttcactgcaaccgatgcgtgcagcatgggctccagtcgcaggctcagcttgccggaatagggtttttgaggcgccttgttgatcttctcgcaggtgtccaggtaatcgtccaccgcttccttgaatgcctgtctcagcgctgcgaccgattccccatgaaaccccacgatgtcgcggattcccgcaatgtggccgataaacagcccgtcctcatcgctgtactcgatccgggcggcgtagcccttgtaggtcatcggattcatggcttgactcctgcctgctcgaggaatgccctggcgtcgcgcacctgatagggcttggcttccttttccgggtggggccgatgagatgaaacgtcgcgacgtgccttgcacacttgtgcgcttgatcaagcagggagaggcgactgcacgggtcgaaacctgccacgacatcttggagctgcaaggccgggcgcgacacctggcatatttgccagctagttttccgagccttaccccttaggctgatggcgaggcatcccgcctcgtcaacgtaagaggggtatcgccatgttcaagcttcttcaaaagcgcaaatccaatcgaaacgtgatggatcgggccgtcgtcatcaagaacgccaaagcgaaaatcaacggcgtaccgggcggcgcgatcgtcgagggtagctatggcgtctggtcccgttgatggacctctgggtggcggcgtcgtcacccagatcttgtcacctcgatgacgcagattttcaaggcagggtacggatcggctgcggccccgacagcgcaggagatcgtaccgggactccagatacggcttctacgagatgcggccgtgctgacgaacacgggctccgaagtcttctacgttcgagctgcatcagcaagtttcagcatctggacttccctgaagcacctgttgaagtcgatacgaccggccctcaacccaggctacctacgccatcatttgcactttggtgagacggcaacccatgcgactgcctggcgcgacgttttccaattggtcccaaacgcggccctatcgctgaatgccggtgggtgctcatggtcctttgaaccgtggcgccaggcgcagtgcggcaacacatcctttgatcatcccgcagtgcttctgaagcaggccatcccagattccgcttcgaccgtcgtactcgaactatccggcggcaccgattcgacagctatcgcccacgcgctttctggccgacacgatgtgctggcaattacctgggccgatcctctcttcccgggctcctgcgatgtcgagcatgccaagcgcgtagccggcaagcttggtttcgaacaccgggttgcaaccctgtccccggggggactattcgaggtgccagcgcagtttgagccggacaggcccagcgtatcgctgttcatgatggcggagcgggatcggctcgttcgggatgcgatcgacgggcgcaccgacgctatcgtggtcaacggtcatggcggcgatcacatcttccttgatccgccgagcccggtccccatgctggaccttttgttccatgcccgttttcgcgaagccctgaggtactaccggaccctcgtcgaattccatggcgggggtgtgcttgctccgttgcgatatcgcagggtcggtcgcggcattggccgtagttctttgagcctcacgccgggaaaacgcttacaccgacgactgatccagcaggcctgctacgaaaatgcgatctggagcaggctcggtccgcagtacaggctggttcacccattcacctgtcccgcgatgttgaactacgcgctgtcgatcgccccgcacgagcatgtaggtcaggggcaatccaggctgccgttcagaacggcgatgaatgactaccaccagaccgaggacttcagccgcataagcaaaggtcaccttaccggcgcttttcagcgggccatccagctcaaggaggaaatattggcggcgcttttggagcggggcatcggtgcgaagcacaagatgtaccgcgttgaggatatgcagcgggcgttgcgagcggccgcgcttggctccacggagatccatccgcagctcatgaatgcactgtcgctggagctgttcatgcagcattggtctcgtctttcgggggtggctcgatggcagatcggttcctgaggttcgcgtcctcggtttttcatgtgttggcagatggcgagctggtgctgctcgatgcccgctcgaacgagttcgtcctcttcgaccgcgacgcatcgcgtgagctcgtcgacgccatcgaggggcgagccatgagttcgcttgccgagcgctttattgccgaaggcatcctggagcacgccgtgtcgatgccaaggctcaatcggagccacgcgcccggactcgatgacttcagctggagcgagtcgatccgctacaaagcccgccatcatgcaagctgtccgtctgcccaggaggttctcttcgctggtctttcgctcgcaaaggtgtgcgttctgctcaagtgcttgtcgctttgccgtctgcttaagagtggccaggccaacctctgcagcgaaagcccggcgtcggcgacgctcgaccgagaaatctgcgccctgatccgtgccgctcgttggctcccgtgcaaagtcgcctgccttgaattctctctcgccctgcgcgaacgcctggcccgccacggcgtcaatgcaaccgtcgagatcggtgtgcagaagtacagcttcatggcgcatgcctggctggaagtaaacggtcagcccctaggtgagccggaacatgtcgcccgatctctccaccgcctgcggggtacccaatgacgcaagcgctgcagcaataccgccgagccctaacactggcccgtacctactacccgaaggcctttacctacttcgcgatcgcctctgcgatcctgctggcgttggcgctactgaacgccaccgttccggtcctgcttcgcgaagcaaccaaccggcttgccgcaggcgatgccatgagcattattctggtcacggcggcggcctatgcactgtgctggaccggtgcgcaggtgctggagtggaccaagaacatcctctcggccgcggtgctggtgcgctgcgatgcagcgttctaccgcgcgttcttcgatcacctgctcaaggtgccacaggccgagctgcgcaagctcgaccagggcgtgctggtcgccgatgcacagcgttccaagggtgccttcagtgcgctcaccagcacgctgttctggatcgtgctgccgacactgatcgagctgctgttcgtattcgctgtgctcgccacattgatcagcgtcgccttcgcggcgttcttcatcatggccatcgtcgggctggttgggctttcggtgctgctgtcccgcaaggccaagggcattcaccagcgcataatggaatcgaacaaccaggtgatgtcgcatttcaccgagcggatgcgcctggtcgaggagatcaagctcaacaatgcccagacgctggagcagcagcgcttcggcacaaaggtgggcggcttcatcgacagcgtcaccgtgggcaacctgcgcattggcctactcatgctgctgcaggtcaccctcgttggtgcgttgctcctggcctcgacgctctacgtcgtcggcgaggtcgcgaagggcacctacaccgtcggtgactacgtcatgatcaacggctacgtcatgcagctcacgatgcgcctggccctgctggccagcgtactgatcgagcttcgcaaccacctggtcctgctggacagggggtttcattacctggacctggaaaccgagccccaaggcctcaggacccccgacaccgacgccgaagtcctattcgagctcgagggggtgacctatcgcgccgaaggccggacgatcctcgacaaggtcgacctgcagatccgccagggccatacctatgcgatcaccggaccctcgggcgccggcaagacgacgctgctgcgcctgctggttggactgatccagccggagaagggctcggtcagggcatttggcacggacaccagggccctcgatcgcactgcgttgctcgacgccgtctcggtcgttacccagcatccgctgctcattgccggcagcgttgccgaaaacgtccgctacggtgcaaagggaaacttgagcgacgaccagctcaacagcctactcggccagctcggactcgacgcccatgccagcgacaccccgaccacggacaggcacgtggggttcgatgccgctgccgtgtcgggcggcgagaagcagcgcatcgcgatcgcccgggcgttggcgcggggaacgccgacgatcctcctggacgagcccacctcggccctggatgtcgagagcgaggagcgcaccatcgatgtgctcaaggccaacgcccggacactggtgatgatcacccatcgcccatctgtgattgccaaggccgactacgtcattcacctccgcggcgacgggacggtgcgcatgagtggccgtccaaactagccaaaagccccgcagccgcaaacgctacggcagtcgcaagtttcgggtgctgggcttggacgtcgataagcacaaaggccgccctgagtagggcggcctggcgttgcacttagaacttgaccacagccccgtctgccgggatgtccacgcggtcttgaataccctgctcgacgacgtaggctttgagctcctggcgggtttgactcatatgattaatagcgtccaggtgggttgccacgatgcgggcgttgggcacagcctgcgctgcatgggcgagatctttcttgcccatgatgatggcgccctcgtaaccgtttaccaaggcatagccggcgttaacgacgactacctccgggttgtaccgcgccagcgcctggtcaacttcgtcacgccaaatggtgtcgccaatcaggtacatggtcttctggcccggggcctggaacacaacacccatcgcttccccgagaagagcagcaagtggtgcattggcgtacatcgtgtcggtgccgtgctgcccaccagtcttgctcagcgtgacccccccgaactcggtcccatcttcaaggatgcggacatccttgaagccttgatcgcggatgatcttggcgtccgactcgttctgtacgaatagcggcagatccttgggcagcagcttctgggcagcatcgtcccaatggtcgaggtgggtgtgtgtgacgatgattgcgtccaccccagcgaggatctcctgggtcgacgtcggcagttcgaccagcgggttgcgcagctcgctgcgataggtgccttcgaacccagggtaagcgccttttttcgcgagcatcgggtccacgaggaacgtggtatcggcgtagctgatctttaccgtggcattgcggatctgctgcatctgcacggcggcaccagccgaggcggacgaactggtattggtgtcattggcccagcccgtgccagcggtaaggccgagcgcgagaaagagggacgttgcgagcgtgcgttgaaacagcatggggcgactccaaaggtgctgtggaaggagtacgcattgtgggcaccgggccttgggggcgaaatcggcctgaaagacaatcatcgataaatttaggccaagctgaatggaaaatcggcagtgctcagccggtagcgcctggctccatgccaaaccggcgtcgataggccccgggcgtcagcccgacgacacgggtgaacactttcctgaaagcgcccgggtccgcgtaaccgacctcccaggcgacccgctcgatgggcaggcggcctgtctgcagcaactctcgggcgcgggcgacccgtagccgctggcaatagtcggtggtggtcataccagtggccttgcggaaacggcgcagaaaggtcctttcctcaaggcccgctcgtcgagcgagctcggccagtgcaacgtcttcggcagcggtctcatgcaaccagtgctggacggcgagaatggcgctgtcgccgtggttcaaccgcggcgcgaaggcgctgtagtagcgttgctgccgacccggtgggtcgatgaccagcatctgcgcggtatcgatcatggcctttgcgcccaggtagcggtcgacgagccgcagccccagatcggtccaggccataagcccaccggcggtgatgatgtcatcggcgtcgatgatgagctggtcggcatccaggtggacattggggaagcgggccatgaattgctcgacatagagccagtgggtagttgccgtgcgtccggcaagtaaccctgtctcgccaagcagaaaggcgcctgcgcagatcgatgccagcctgacgccggcctcatgctgttggcagagccagtcgcgatagaggcgagcggcctcggtcgaaatcggctcttccaggctgggcgggaggatcagtacgctgggtgtgcagcaggcatcggggtgcgagtcgtggacccgtttggcgggctggccggtttcgccgatttgccaatggctgatgcgcagttgaggtcgatccgggtcgtccgccgcgccatcgaaccgcgcggcgatgccgaacagatcggtcaggccgaataccgtcgccatctgcacgccggggtagagcacaatccccagttcgatttgtggttgattcggcatgtgtcgatagcaccctcgaagttgtcggtcgcaccccttagcagtgctgcgaggatgaccaatgatgttctcgtcatttcctacagcatcttcgcaggagctaagcatgagcaagcgtgcagtggtcgtaatcgacctgcagaacgaatacctaccaacgggcaagttgccgcttagtggcatcgaaggcgcggttgccaacgcggcaaaagtgatcgccgatgcccgcgccaaaggcatcccggtcatccacgttcgtcacgagttcgctcacggcgaaatgccggtgttcgtccccggcagcgatggcgtgcagatccaagccgccgtagcgcctcaggcgggtgaaccggtggtggtgaagaattacccgaactccttccgcgacaccaatctcaagcagttgctggacgagcggggcgtagaggagttggtcgtagtcggtgccatgagccacatgtgtgttgacgctggcgtgcgcgcggcggccgatatgggctatccggtcaccgtcatccatgacgcctgtgccaccctcgacctggagtttggcggcattaaggtgcccgcagcgcaggtgcacgccgcgatgatggctgctctgggctttgcctatgcgaagctgggatcgaccgcagagtatcttgcgggctgatttttcttgctgaaagaacgatccagcctgtgcgattgcgcgggctggattgctggtacatcgaggccaagcgacagcccgtccgtcgaagaccgctgagcggtaccaggcgcacgcaggcgtctgccgccttgatcgacctgttctccgatggcgagctgttgtaaggcgaacctaccagcgcggtctcgcggtcttctgcgcgtaatgcattggcagttccactgaggccaggtacctgggtgaatgccccaatcggccagccaatcgagcccggcacccgcgagcgcgcccagtggcctgccagctggtgccccgagcattatgccggtctcggtaccggtgcggccgttctgtagccagattctggagccgccgaagtgggcgtatcgttggcccatgtggcattcacggaaagatatgggccatatcttccgtaaccatgcgatgctcgctggccacctacaccgctgaggtatgcccatgtcctcgctgaatgtctgcgttgtcgcgttcgagggcgtgagcctgttccatctctccgtgccggcaatggtattgggtgccggggatgaagggccggacagtgcgcgctatcaagtgtcctactgtgcggcgcagccgggcaaggtgcggtgcgatcagggcctgacgatcgacgtgccggacgggatgacgcccatggcacgcgccgacatcgtcattgtccctgcctggaatgatcccgaggttgccgcgccagcggagctgatcgatggtctgcgtcaggctcatgcgcgcggtgcgctgatcgtcggcctgtgtctcggcgcgtttgtactgggcgatgccgggctgctcgatgggcgggaagcaaccacccactgggtggcgcgcgaggtgtttgcccggcgcttccccaatagccatttccggcctgacgtgctctacgtggcggacgacaacgtcatcacgtcggccggaacggtggcggccatcgactgctgcctacacttgctgcgtcagcgccacggtgcggatgtggccaatcggatcgcgcgactgctggtcacccctccgcatcgccagggcggacaggcgcagtacatcgagcagccggtgccgcaactgccgagcgagagccggttacctgaggtgctgacttgggcgcggcaaaacctgcatgaggcgttgtcgctggatgccctcgccgaggtcgcccatatgagccggcgaacctttacccggcggttccgcgaagcaaccggtaccacctttatcaagtggctgaatgccgagcgtgtggcaagggcccagcagttgctggaaacgacggagatgcccatcgattgcgtcgcctcgcaggtcggctttggcaccaccctgtcgctgcgtcagcagttcgcggcccagctgagcacaacgccttccgagtatcggcgtaatttccatgcggtttgtggttgagcgcagggtagcgacaaatctgcgggaaggtgtcgattgccgaggggcccgcacgactagttctgccatcgcaacgtattcgcagcgctgaaagccacatgatgctgccaatgccctggtcgcggctccaggcggatgcctgggcaccggctcggtggcgtccagacgatcaacatggaggccgaaaatgaacagcaaaaacaccatctgcctgtggtacgacggcactgcgctcgaagcggctaccttctatgccgagacctttccggacagtgccgtgggcgctgtgcatcgtgcgccaggcgactatccctcgggcaagcagggcgatgtccttacggtcgagttcagggtgatggggattccttgcctcgggctaaacgggggcccggccttcaagcattccgaggcgttctcgttccaggttgccaccgacgaccaggccgagacggaccgcttgtggagcgcgatcgtcgaaaacggcggccaggaaagcgaatgcggctggtgcaaggacaggtggggcctgtcatggcaaatcacgcctcgcgttctgacgaccgcctataccagccccgatcgggcaacggcaaagcgcgcgttcgacgccatgatgggcatgcgcaagatcgacatcgctacgatcgaggcggcattgaggggctaatcgggccggcgatccgcagaaggcggaagcccaaccggcgcccaagctcctggtgcccgagcgagcagcgagcgggcgcttcagtgccccgggtggtcgccaatgaacttgctcaggaactgccgcgtacgttcgtgctgcggtgcactgagcagctgcctggcgtcaccctgttcgacgatcaccccgtcgtcgatgaagatcgccctgtcggctacgtcccgcgcaaagctcatctcgtgcgtgacgatgaccatggtgcgcctttcctcggccaggccgcggatggtggcgagcacttcgccgaccagttccggatccagcgccgaggtcggctcgtcgaacaggatcacgtcgggctgcatggccagcgcgcgggcgatcgccacgcgctgttgctgcccgccggagaggcgcctgggataggcatcttccttgccctccagaccgaccttggccagcaatgcccggccgcgctcgatggcctcgttgcgcggttccttcttcacctgcaccgggccctcgatgacattctcgagggcggttcgatgtgggaacaggttgaagttctggaacacaaaaccgacgtgctggcgcagctcgcgaatcagcccctgctgcgccttgagcggccggtcggcgtcgatgtggatctcgcccacgctgatctgcccaccgctgggttgttcaagcaggttgaggcagcgcagcagcgtggtcttgcccgagccgctggggccgatgatcgccagcacctcgccgggggcgatgtccaggtcgatgcccttgagcaccgcctggccgttgaaggatttgctcagattgcgcacggtgatcatcaggtgtcctgctcgtggcggttgacccgatgctccaggcgcccctggaagtacgccagcacgctggccagcaaccagtagatcagcgcagcggccaggtacatggtgaagatctcgaaggtgcgcgcggtgatcagctgcgcctggcggaacagctccggcacctggatggtggcagccagggcggtgtccttgaccagcgagatgaagctgttgcccagcgggggcagggcggtgcgtgcggcctgcggcaggatggcccggtacagggtctgcgcacggcccatgccgatgctggcggccgcctcccactggccacggtcgatggaggcgatggcggcgcgcaggatctcggcggtgtaggccgccatgttcagcgagaagccgatcagcgccgccggcagcgggtcgagctgaatgcccagttgcggcaggccgtaatagatcatgaacagctgcaccagcagcggcgtgccgcggaagaacgacacgtagacccgcgccagccactgcagcggccagaacgcgtacagccgcagcagcgccagaccgaagcccagcagcacgccgaagaacatgccgcccaggctcagcaccacggtccaccacgcacccttgagcaggaagggcagggagtccaggaccagctgcaggctgccctcgatcattgcgtgacgtcagccccgaaccacttctccgatagctccttgagcgtgccgtcggcgcgcagcttggctatggcttcgtcgatggcggcgagcagctgcgggttgcccttgcgcagggcaacgccggactcctggcgggagaaggcttcaccggccaccgccaggcgatcgccggttttctcaaccatctcgaaggcggccagacggtcgaccaggatcacgtcgatgcgtccgacggcgaggtcctgaaacttggtcgggtcgtcgtcgtaggtgcggatatcggcctggggcacgttttccttcagccactgctcgtagttggtgcccagacccacaccgaccttcttgccggcgagatcggtcggattcctgatgctttcggcatcggccttgcgcgtaagcgcctggatgccggagacggtgtagggcgtggaaaagtcgtacttctgcttgcgctcctcggagatggtcacctggttgatcaccacgtccaggcgcttggattccagggcggcaaggatgccgtcccacttggtcggctggaactcggccttgacccccagctcctctgccagggcattggcgaagtccacctcgaaaccggtcaactcaccgctttcatcctggtagttgaagggcgggtaggtgccttccaggcccacctctaaaaccccgtcggccttgacctcatccaatagatcggccgcgtacaccggcatgaacaggcttccgagcagcaggctcagactgccgagcaggaaatggcgacgcaggatcgcaaacgtcatggcaggcctccaggagatcggaaaggtcactcaactctaacgatgaacatttattcgagaaaataattagaaggcatcagaaccaacgcccagggaatatggcgttatgcattcagtgcccatggataataggcgaacaatgccggggcaccaccggtgtgcaggaacagcagcggacccttgccggggaaggcaccccgggcaaggccgtcgagcaggccggcaaaggccttgccggtatacaccggatcgagcagcacgccctcctgctcggcgagcaggcggatcgcggccagggtgccggcattcggttcaccatagcgcgggacgaaatactggtcccacagctcgacctgcagccccaccggcatctggacgccgagcagctcggcggtgcgctgcagcagcccctcgaccttgggccgctgtgccgcctctggccgcgacacggtgaccccgactacccggctgcccggccgggcatgttccagcgccagggccaggccactgtgcgttccggcgctgccggaggcgaggaccacagcagcaaaatcctcgccggtcccgtgcatctgctcggccagctccaggccagcgcgtacatagcccaacgcaccaagcgcattggagccaccgatgggcaccacgtagggtttgcgccccgcacagcgcagacgctcggccgccgcctgcagcaactcgtcggcgttatccaggttggctacagcttcgatcgagcagccgaacaggtcgagcagcaggcggttgccattgcccaggtaattgcgctcgtcggtacccagcggattctccagtagggccagacagccaaggcccagcctggccgccaatgccgcagtctggcgcacatggttggactggatggcgccggccgtgaccagcacatcggcgccctgagcctgggcctcggcaccgaggtattcgagcttgcgcgccttgttgccaccgagggccagcggggtgaggtcgtcgcgcttgatccagatatcccgacccaggtgacgtgacagacgcggcaggtgttccaggggcgtaggggcggtaatcaattcaaggcgcgggaagcgggcgagggcgtcggtgagcatcgggcaggcttcagagcagggacgaatcatcactgtagaagggaattcaaacgtccaccacgtccataccggtgaagccctcaccaacccaagggcagttaaaacaacccaagggcagtcgccatcgccacggccgccgcgatgttgcgagcaccgagcttgcacatggcgttctcctggtggaagcgaacggtgcgcggccgcaggccaaggatcagcgcgatctcttcctgtcccttgccgcgcgacgcccagagcaggcattcgcgctcacgccgtgtcagagctcgaggccgacagcccgccatcaactgcccgacccgcaggtgcagcgtcgtggcaacgccagatagcaacaacgcatcgcgaatacagatgtcccgtccgtgaccaccgtccaccgcctggctaatgctgagcaacgcgagttgctcgccgcgcacatgaacggggatcgaggcgccccgacacacatcgatgccatgccgcctggcacaggccaggaacgccgcatcaggcgaacagcacgaagtccgcggacccacgtcccgccagagaaagggcaggggacaactccgcgcatgacgcacaaacggatcgatgcactgatagccatgcgagcgatacagctgctgccagcaggcgtgatggttcgagacaagcaggggagcagtacccagcacggtgctgtccacgcgaacgaaggcgtactgcgcgatgcccaggcccgaaaagagcctgcccaacacagcccgcaggtcatccagcgaatccgcctcgctcaggtcatgcaacgagcgccggatcagctccagttccaccgcaagtctccgggagcaatcgtccgatgcaaaacgccaagacgaaaacgatcagcctcgccgaaacgacgaggagccaaaaggcacccaggcgcaacagggcaaacgacgcaaaccgcgcgatgagcccacaccgagcgccaaagataggatcagagcgggccgcccgaacggacggcccattggctcaggctcgcgccgattccgccccgaatgcccgtcggtacagcacgaccatctcgtggagcagttcctgggccgcatagcccagcaggcgcgcacgcagatcaagggtctgcacgccctcgtcctcggtcagctgaagcaaaagcccacggatcatctcgacacgcagctcggcctcggccaagggaccggaagacgaaacgacagtcgaacaacccgtacgggcagtggaaggaaaggccaggagattggaaggatggtcagtca

SEQ ID NO: 79 - DNA, 16594 bp, Unknown
  From metagenomic library of CO182
  misc_feature (2831)..(2848): n is a, c, g, or t
ggcatttattctcaggataattgtttcagcatcgcaaccgcatcagactccggcatcgcaaactgcacccggtgccgggcagccacatccagcgcaaaaaccttcgtgtagacttccgttgaactgatggacttatgtcccatcaggctttgcagaactttcagcggtataccggcatacagcatgtgcatcgcataggaatggcggaacgtatgtggtgtgaccggaacagagaacgtcacaccgtcagcagcagcggcggcaaccgcctccccaatccaggtcctgaccgttctgtccgtcacttcccagatccgcgctttctctgtccttcctgtgcgacggttacgccgctccatgagcttatcgcgaataaatacctgtgacggaagatcacttcgcagaataaataaatcctggtgtccctgttgataccgggaagccctgggccaacttttggcgaaaatgagacgttgatcggcacgtaagaggttccaactttcaccataatgaaataagatcactaccgggcgtattttttgagttatcgagattttcaggagctaaggaagctaaaatggagaaaaaaatcactggatataccaccgttgatatatcccaatggcatcgtaaagaacattttgaggcatttcagtcagttgctcaatgtacctataaccagaccgttcagctggatattacggcctttttaaagaccgtaaagaaaaataagcacaagttttatccggcctttattcacattcttgcccgcctgatgaatgctcatccggaatttcgtatggcaatgaaagacggtgagctggtgatatgggatagtgttcacccttgttacaccgttttccatgagcaaactgaaacgttttcatcgctctggagtgaataccacgacgatttccggcagtttctacacatatattcgcaagatgtggcgtgttacggtgaaaacctggcctatttccctaaagggtttattgagaatatgtttttcgtctcagccaatccctgggtgagtttcaccagttttgatttaaacgtggccaatatggacaacttcttcgcccccgttttcaccatgggcaaatattatacgcaaggcgacaaggtgctgatgccgctggcgattcaggttcatcatgccgtttgtgatggcttccatgtcggcagaatgcttaatgaattacaacagtactgcgatgagtggcagggcggggcgtaatttttttaaggcagttattggtgcccttaaacgcctggttgctacgcctgaataagtgataataagcggatgaatggcagaaattcgatgataagctgtcaaacatgagaattggtcgacggcccgggcggccgcaaggggttcgcgttggccgattcattaatgcagctggcacgacaggtttcccgactggaaagcgggcagtgagcgcaacgcaattaatgtgagttagctcactcattaggcaccccaggctttacactttatgcttccggctcgtatgttgtgtggaattgtgagcggataacaatttcacacaggaaacagctatgaccatgattacgccaagctatttaggtgagactatagaatactcaagcttgcatgcctgcaggtcgactctagaggatcccacaatggctagcggcataaaacaccataaaacagctgcgcccagcgccgcgcctgtgatctggtctgccaggggcttgcttttggagcgtgcggtatcgccaacgtgcaccagggtgcgaatcagcagaagcggccagaagcgcgacactacatgcgccccgaccagtgccgccagggccgcgcccaggctgtgcgcacccagcaaggccagcagcccgattttggccaggagggccagggtgccggcaaaccgggcggcgttgtagccccgagccagccgccccaccagggggaggttgagccaggcggcatcgaatttttcacgaaaaacggccatggacaaagcccagcgtgcgccgatagctattacaacaatagcacccaaggcccacagtccctggttgcgcacaaagctgctgatggccagcatggccaccgtgaggaagggcagggcgcgcttggtgcctgcgaacacgctggccacctgcggcacgacgtagctgaccaggaagatcacgatggcgatggccaccagggtgacgatcgccgggtacagcgccgcgcccaccagcttggccttgagcgcctggcgctcttcgaggtcgtcggccaggcgctcaagcaccaggccgaggtcgccgctgtgctcgcccgcgccaatcaccgcgcagtagatgtcggcgaactcgcgcgggtgctgctgcagggcgcgtgcgaaggtggagccggcattgacctcggcgcgcagcaccgccaccagatgccgctggcgctcgttttcagcctcgtcggacagcgccgtgagcgcgcgctccagtggcaggcccgaagacaccagccccgcgagctgccgcgtccagatggccagtgccgtggcgccaaacaccggccgcgtgaacaggctggtgcccagcgcaccggccgatcctgcctgcggggcgtctccgaccggctccaccaccaggggcaccagcgcctgcgtgcgcaactggctgcgggcagacttggcggagtcggcctcgaccacgcccttgcgggtcaggccctggtcgtccagggcttcaaagcgaaaggcgggcatgcgggtttaggggcggtcggtgggcgggagggggtgacagggtacgatggtagccgctgcgagccagtgcgttccctcaaggcgcgccgggcgccaggnnnnnnnnnnnnnnnnnngccgcgatatcgagcgagcgcaggcgcagcgccgggtcgtacacatcgcacaccagtatcagttcgtcggcaccggtggcgtcggccaggtgttggaggcccgcgcgcacggtgtcgggcccgccgatgactgcggcggccagaaagtcgtcaatggcggcgcgctcctgcggctgcaggcctgcggcaaagttgtcgactggcggcagcaggcagcggcggtcgccggtcaggatgcccagcacccgctggtaggtgctgctggccagaaactcggcctcgtcgtcggtgggcgcggcaatcagcggcacgccgaccaccacatagggcttgggccaggcggccgacggccggtacaggttgcggtacaggccgatggcctggtgcagcatgcgcggcgcaaagtgcgaggcaaaagcgtagggcaggccctgctgcgcggccagctgggccgaaaacaggctggagccgagcaaccagatgggcacgttggtgcccgctccgggcgtggcaatgagccgctggccgggctgggcgggggccagcaggcgctgcagctcggccacgtcgcgcggaaagtcttcttccgtctccacgcggtcgcggcgcagcgcgcgcatggtcaccgggtcggtgccgggcgcccggcccaggcccaggtcaatgcggccggggtacagctcggccagcgtgccaaaggcctcggccaccaccagcggtgcgtggttgggcagcatcacgccgcccgagcccacgcgcatgcgctgcgtgccgcccgcgatgtggcccaccagcacggcggtggcggagctggcaatgccctgcatgttgtggtgctcggccagccagtagcgctgaaagcccagcgattcggcgtgctgcgccgtgcgcagggcaatggccaaggcatcggccacggtgccgccttcgcggacggccaccaggtcgagcatggagagagcagggggcttgggtgggttcatcggggcattgtcgcgcgaggacgggtcgcccggggtatcacacaggtgcccgggtggcaattcataggtagccaaaacacttttacgcacacaaaatgttttgaatagatcgtcgatggtgactcccgcgcggggcgtcgcagtatcggcctcattcaccagcgcgggggaagcatgggttttttcagccgtttattcaaattcagggagcaggaccctgacagccaggaaaccacctgggcctatgaggacaacgccagtgaactcgtgctcgaccccgagtacgcggctacgttgatgaccgaatttgacatcgatgccgccatcctcagccatgaggatctgcaacggcgtctgcagcgcatggtggaaggtagtgccgacgaggtgatcgaccccgtggccgtcgggcagcatgaggccagtggcctgggccaatggctgagcggagcgggccgcgaggtgctgggcaagtacccggcgttcgatatgctggtggcgcggcataagtatttccatctccaggcagcacaggtggcgcagttgcgccattcgggcgagtacgaaaaggcccggcagctgtaccacggcggctaccgccatgcctcgaaccaggtcacgctgctgctcaaggagttgcgccgcggcctgggcaaataagagcgactgacaatactcttctggcgtcgttgctgcgtcttgtcgtactaaccgtactgtctgcgacgcagcgcctagccagaaccgctgcgctaggttttgttagccgctcaaaatcagcgcgcgatttcttcccgcaccgccgccacctgcctgcgcgacacggccagcagctcggccagcccatgcaggcgcacggcccagccctcgccctcttcggggtcgtagtgcttctccagcgcgcgcacggcgcggcgcgccaccagcgcgttgcggtggatgcgcaggaactgttccgggtagcgcgtttcaagttcgctgagagacccgtccaggacgtagttgcgcgcggcggtgcgcaccgtcacgtatttctgctctgccttgaggtacagcacctcggccagcggcacgcgctcggtgcggccccggtcctggatgaccagggtctcgcccggaggcgctgccgtggcgggggcggtgggcggtgccatgcctgagccggggcgttgtgcgcgctgcgccttggccagtgcctgctgcaggcgctccagacgcaccggcttggtcaggtaatccacggcgtcgagttcaaaggcgctgaccgcgtggtcagcgtgcgccgttacgaacaccacggcgggcgggtggcccagggcctgcagggtctgggccagacacaggccgtcctggccgggcatgtggatgtcgagcagcaccacgtcgaaggcgcgcccaccgctgggcgtcagcagggccatggcctcggcggccgtggcggtttcggtcagcgcatggcgctcggtgccggtgcagtcacccaccagggtgcgcaggcggctacgggccagggcttcgtcgtcaacgatgaggatgttcatgcggagcgcgcggtggtgtggttggggggggcgtcgggccgggcggtggtgcgggcagggtgatgcgcacctggtacaggccatcctgcacgcccgcgctgaattctccctgcacatcgtgcagcagggccaggcgggcgcgcacgttggccagcgcgatgccatggccactggaggcggcatcctggggcgggggtgcgtccggcagggtgttggtgatgcgcaccaccacgcggctgccacgcagttcggtgagcacgcgcagcttgccgccgcgcgcgctgggctccacaccgtgcttgacggcgttctccaccagcggttgcagcagcagcgggggcagctgggcggcgtcggcgcgcgggtcgatctgccactgcacgcgcagccgctcgccaaagcgcacctgctcgatggccaggtagcggcgcgcgagctggatttcctcggccagcgtgaccgcctcgccctgctccaccagggccgagcggaacaggtcgctcaggtcttcgagcagcgcctcggccttggcgggctctgcgcgcaccagggcaatggcgctgttgagggtattgaacagaaaatgcggccggatgcgcgactgcagctcggtcagccgcgctgtggtggccgccggcgtgcggccgcgcgcgcgcagcaccagcgcggccaccagcagggccgaaagcagcgcgccgctggcgctgctggccagccagggcggctgcggcgccatgcccaccagcgccagcatgccgcaggcccacaacccggccagggcgcccagcagcacgcccgcggcgtactggccggtggtgggcaggcgctgcagcaccgtcttgaggctgcacgccgcaatcagccaggccagcgtggcgggcagtgcgccgccggtcagcaaggccagccgggccagccattcgggcagactgtcggcaccgtacatggcgcccacgcccagcaccccttcgacgaacagcaccgcgcgcagcaccacgcctgcatggcaggcatcgaacaccagcgcacgccccacgtgcctgctggcgggttcggttcggggcgttcccggaagggtcgataaaatttgcgtctcttgcattgcggcatccgggtgttccgggtgtctgttccaccggattattgccctcccatgcccaaagcccaagcctccgcaccgtcccacaaccagctcgacaccaaggcgcaggcatggtcggcgctgttttccgagcccatgagcgacctggtcaagcgctacacctccagcgttttcttcgacaagcgcctgtggcaggccgacatcgcgggcagcctggcccacgccgagatgctggcggcgcagggcatcatcggcgcgcaggaccatgccgatatccagcgcggcatggccacgatcaccgaggaaatcgcatcgggccagttcgagtggaagcttgacctggaagacgtgcacctgaacatcgaggcgcgtctgacccagctcgtgggcgacgctggcaagcgcctgcacaccggccgcagccgcaatgaccaggtggccaccgatgtgcgcctgtggctgcgcggcgagatcgacctgattggcggcctgctgaccgacctgcagaaggcgctggtggaagtggcggaaaagaacgtggacgtcatcctgcccggcttcacccacctgcaggtggcgcagcccgtgagctttgcccaccacctgctggcctatgtggagatgttcgcgcgcgactttgatcgcatggcggacgtgcgccgccgcaccaacgtgctgccgctggggtcagcggctctcgccggcaccacctacccgctggaccgcgagcgcgtggcgaaaaccctgggcatggacggcgtgtgccagaacagcctggacgccgtgagtgaccgcgacttcgccatcgagttcacggccgccgccagcctgtgcatggtgcatgtgagccgcctgagcgaagaactcatcatctggatgagccagaacttcggcttcatcaagatcgccgaccgcttcaccaccggcagctcgatcatgccgcagaagaagaaccccgacgtgcccgaactcgcgcgcggcaagacaggccgcgtggtgggccacctgatgggcctgatcacgctgatgaagggccagcccctggcctacaacaaggacaaccaggaagacaaggagccgctgttcgacaccgtggacacgctcaaggacacgctgcgcatctttgccgagatggtgggcggtcagatgaacccggccagcggcgccaaggaaggcggcatcaccgtcaacccccagaccatggaagacgcagccaagaagggctacgccaccgccaccgacctggccgattacttggtgaagaagggtctgcccttccgtgacgcgcacgaaaccgtggcccatgccgtgaaggcggcccagtcccatgcctgcgacctgtcggaactgccgctggccgtgctgcagggcttccacgcgagcatcgagaaggacgtgtacgaatgtttgagcctgcgcggctcgctgggcgcgcgcaacaccctgggcggcaccgcaccggcgcaggtgcgcgcgcagatcgcacgccatcaggcgcgcctgggttgattcatttttttgagccaaacagaccaaaacgcttgatctgtaagcggtacaagctattgaatcagtagcgtcaagcgtggtgctcaggccagcgtgcgcacctggggttcgcgctcccactgacgggtctgggcggcggcaaggaagccttgcacatcggccgggtccaccacgccggcgtcgggcgcaatgccgccagcctgcaggatggcctgggtgcccttgcaggcggcaatggccttgaggtggccaaatgcatcgcggaaccagtccacggcggcggcttccttggccagccgggcgcccatctcgggcgacagcaccgaggccacggcgtcaaacaccaccgacggagtgcccgccagctggccgtcggcaggcaacagcgtgccgtccttgagcacggctccccccactttgggtgacacgatcttgaccgaggcacccaccttctccagtgccttgcgcagggcggccaccgaggtgccgttggagccatcggctaccagaatgcccacgcagcgcccctgcagcgtgggcttcatgcggtcgatgatgcgcagtgccggagagagcgccagatcctgcacgggctctgcggtttgcggtgcgggcggcagggcctgcaggcccaggccgtcggccacacgctgggccagttcggggtctacgtgctgcaggtgtcccaccaccgcctcgcgtacatgcggcgtgcccaccttggacagctcgaacaccagtgcggatgccatgtgcgcctgctccagcgggctctggctgcgaaagaacatgcgcgcctggctgtagtggtcggcaaagctctcggggcgcacgcggcccttcacgccatcgtcggcctgcgcaaaatgccgaaagccctgcgcctgcgatgcgcgtggcgagtcgctttgcaggctgctgggctcgtagttcacgcggcccttgggcacctgcatctgcatggggccgtcgcgctgcaggttgtggaacgggcactggggcggcaccgggtgcttgcccccggcttgctgctgcagttcgcctgcgttgccgcggtaggtttccgcctgggtggaagaaggtgcggcagacggcgatggggtcgccgtgccgcgcgaagtggggggtcgtgccatggaggttcctggggttgttcgttggagaggaaggctctcatctttggctttccgcgccccggccggggtaggacaccgccttcagggggcgtcgtcggcaggcggtgatgtgggttgactcgtaagtgcttgcaacgtgctgcctggggcgatgcggttttgttacgcttgctggttccttcggaggggaaagcgtgaacgcacagaaatggttgttggccgccagcctgtcgctggtggcatggggcgcgcaggcctttcagatcaccagtctttcgccccagggcgaggtggctcgcgtgcgccaggtggtggcgaagttcgacagcgcagccgtccggttcggcgaccccaaggcaccggcccctctcagcctgagctgcagtgatgcgcaggccagcaaaggtgcgggccgctggaccagcgagcgcgagtgggtgtttgatttcgaaaacgacctgccgcccggcgtgcgttgcacggtggtcatccaacctgaattcaaatcggcctctggcgcccttttgacgggcgccagaagctatcaattcaatagcggtgggccgttcatccagagcctgcggcccggccagtatgagcctattgacgaggagcagttcttcgtgctccagctcaatggcccggccactgtggccagcgtgcagcagcacgcctggtgcgtggccgaaggggtgggcgagcgcattccggtgcgcctgatcgacggcaaggagcgcgccgagctgctcaaggcccaggggctgcagaagcgcgccgaacgggagccgctgtccgtcgtcacattggcgtgcaaccggcgcctcacgccctcggccagggtgcaactggtctggggcaagggcgtggcaacgcccagcggggtggtgggcacggtcgagcggcgctacagctaccaggtgcgtgcaccgtttgccgccgaattcagttgcgagcgcgagaacgcccaggccgcgtgcctgcccatccggccgatgcagctctccttcaacgcaccggtgccgcgcaagctggcggcggccattcgcctcaagggcccgcaggaatcggtggcgccccggttcgatggcgacggtgcggccgcgcagcccgacgccctggtcagcagtgtgcagtttgccgcgcctctgaccgagaacacatctttccaggtggagctgcccaagggcttcaaggacgctgcgggccgcgatctggccaacgccgacagctttcccctgaaggtggccacgggcggcatgccgccgctggccaagttcgccgccgcgccgttcggcatcgtcgagcgcttcgccgaaggcaaggaggccccggcgctgctgcccgtgacgctgcgcaacgtcgaggccgacctgcgcgtgcagggcctgcaggtcggcagcggcggggtgcctgcgggcaaggtcagcacactgcgcccgcaggaggacgccgagatcattgcctggttccgcaaactgcagcagtacgacagcacccaggtggagcgctcgaaggcgcggcgcgatgtcaaaggcccgctgcccaaggtgatcgacagcgacaaggagtatgtgcaatcgcgcatgctctctctgctcggtggccagagcggcgtgcgcacgctcgacctgccccggcctgccagcgccgacccgcgcccgttcgaggtggtgggcattccgctgggtgccggtttccatgtggtggagatcgcctcgcccctgctcggcgccgcactgctcgatgcgcgtcacggcgccgcgcggaccatgtttgtgcgcacctcggcgctggtgaccaacctgggcgtgcacttcaagctcgggcgcgagaacgcgctggcctgggtgaccacgctcgaccggggcctgcccgtggcgggcgcgcgcgtgcgcgtatccgactgccacggtcgcgaactggccaccggcaccaccgacgcccagggcgtggcgcgcatcgagggcctgtcgtccgacccgccgctgtgcaatggcccgggcgagggcggcaacgcgtatttcgtcagcgcacgccaccaggggccggacggcgtgcaggacatggcattcacctggagcgactggcagcgcggcatcgagccctggcgcttcaacgtgcccaccagcaacgacccgcgccccgacgagcgcgcgcacaccatcttcgaccgcaccctgctgcgggccggagaaaccgtatcgatgaagcacctgctgcgcagcgagacgcgcggaggttttggcgtgcccgaggcggcgcccgacaccctggccatcacccatctcggtagcggccagcaattcacgcaagcgctggtctggcgcaaaacggccacgggcgggcgcagcgcgcacagcagctttgccgtgccgccggccgccaagctgggcgtgtacgaagtggagctgcgcggcagccggggcgagggctacagcctgatcacgggccagttccgcgtcgaggaattccgcctgcccgtgctggagggccgtgtcggcccggctgacaaggcgccgctggtcaatgtgcgctcggtgccggtgggcgtgcaggtgaattacgtggcgggcggcgcagcggcgcaattgccggtgcgcgtgtcggccctggtgcgcagccgctatcgtgggatccccgggtaccgagctcgaattcgccctatagtgagtcgtattacaattcactggcattattagtctgggaccacggtcccactcgtatcgtcggtctgattattagtctgggaccacgatcccactcgtgttgtcggtctgattatcggtctgggaccacggtcccacttgtattgtcgatcagactatcagcgtgagactacgattccatcaatgcctgtcaagggcaagtattgacatgtcgtcgtaacctgtagaacggagtaacctcggtgtgcggttgtatgcctgctgtggattgctgctgtgtcctgcttatccacaacattttgcgcacggttatgtggacaaaatacctggttacccaggccgtgccggcacgttaaccgggctgcatccgatgcaagtgtgtcgctgtcgacgagctcgcgagctcggacatgaggttgccccgtattcagtgtcgctgatttgtattgtctgaagttgcttttacgttaagttgatgcagatcaattaatacgatacctgcgtcataattgattatttgacgtggtttgatggcctccacgcacgttgtgatatgtagatgataatcattatcactttacgggtcctttccggtgatccgacaggttacggggcggcgacctcgcgggttttcgctatttatgaaaattttccggtttaaggcgtttccgttcttcttcgtcataacttaatgtttttatttaaaataccctctgaaaagaaaggaaacgacaggtgctgaaagcgagctttttggcctctgtcgtttcctttctctgtttttgtccgtggaatgaacaatggaagtccgagctcatcgctaataacttcgtatagcatacattatacgaagttatattcgatgcggccgcaaggggttcgcgtcagcgggtgttggcgggtgtcggggctggcttaactatgcggcatcagagcagattgtactgagagtgcaccatatgcggtgtgaaataccgcacagatgcgtaaggagaaaataccgcatcaggcgccattcgccattcagctgcgcaactgttgggaagggcgatcggtgcgggcctcttcgctattacgccagctggcgaaagggggatgtgctgcaaggcgattaagttgggtaacgccagggttttcccagtcacgacgttgtaaaacgacggccagtgaattgtaatacgactcactatagggcgaattcgagctcggtacccggggatcccacctgcaccagctcggcgccggcatccatacgcgcttgcaagtggctcgccgtctggatgccgcccaccgagatcaatgccatgcccaggccgcaaaagcgccgcaagccctcgatttgttcacaagccagtgcctgttgttgcgggtcctgccaggcacggtagcgctcgcgcgtcgctggtggtcctgggtcgtgggcggctaatagcccgtcgaacttgaggtcgagcagcatgctggctagcaagaagggaacctgctttggcaggcagcgtagcttcgctagcagcggtacctggcgcttgccctccaggttcagctgctgatgctcctcgcggagggcggtcaggaggttgcgcaggcgcacggcatttgagagcagaggtgcgctggccgggccgatcaggttcagtaccaggtagtcggccaggggccatgcgttgcgcagcagcgcgcagctctccgccaccgagcttcccgcatccagggtcaggtttattccaagacgcgcctcgccacgtgacatcggctccagttgcgccagtccatccgcagtcaggctaccgatctcgttgaaaccgaatcccagcgccgccacccgccgggcaagacgcccgttgcgatcaaagccggcggcgatacctagcggcgacggaaagcttaggcccatcacggtaagaggccggcccggtacggcgtgcggcagacgacaggcaacgtcgaccagagtcagtgacagctgctgtgccagtgagcggcgtaaagcgtgcaggccgtgccttctatccatgcttacgctcgaaatcagtcatgaattccaccaggcgcgccactccgctcagtggcatcgggttgtacaggctggctcgtatgccgccgatcgctgcgtggccgcgcagattggttaggccgttacgctcggcctcggtcagaaaggtttcggtcagtccgggcttggtcagttggaagcagacattgatcggtgaacggtctgcggggcgttgcggacacaggtagaggtcgctgttgtcaacgcagcggtacaaaaggcaacttttttgctgcgctgcggcagccatggctggaacgccgccgttacgtcccatccagcgcagcatcagcccggtcacgtagacggcgaaggtgggtggcgtgttgaagcggctctgctgttcggcctgcgttgcataactgaacgcggtcggcagacctggagggggcgctcgcagaagatcgctgcggattatcactatgcacagcccggcgatgcctagattcttttgcgcgctggcatagatcaggccgaagcgttcgagcggaagcggccgggtgagaaagtctgaggtcatgtctgcaaccagtggtaccgacagttccggaaacgtctgcagctgcagcccattaccggtttcgttgctggtcacgtggcaatagccggcagccggatcgcgctgccaatgatccagtggaggcagggcggtgaacgcctgatctgcaccactggcgacgacattgactggtgaatgacggcgggcctcggtgattgccttgcgtgcccagtggccgctttccagatagtccgcactctgccctggctgcagtagattgagcggcaacaggccgaactgagccgaggcgccgccttgcatgaaaagcacgcgatagttgtcggggatcgtcagtaatgcacgcaagtcggcttcggcctcggccatcagctgcttgaaggctgtgctggtgaagggctgctcaagcacggacgagccggtattgcgccagttcggcagctcatcgcggatctgttcgaggacctctgctggcagcatggccgggcccgaggcgaagttgtagcgttcggcgcgctcagaagaagtgcaggccatgaccgccactcgccatcaggaacagcaggggaaaggacagaatggtgttgctgcgcgaggagaggaaggtaatccgcgagcagcgcacccgctcttccaaagtcgccggcacgaaaccgagcagctttttctgatgcggccacagcaccagccagaggttgagcagcatcagcgtgccaatccaggcgcccaggccgatcactgccagcgggccttgtagcagcaatgcatcagccagccagccgcgttgccagagcatgaacatgccggatacccagaccaccacggaggcgtagcggaagatgccgtgctcacgtttcatccgcacttccagatcgcggttcaacgtggcgatatcgataccgttctgcagtggcacgaagcgcgagttctggatgaagttggcgtagttgtgaccaacccagaccaacgcgaacagcagatgcgcatagcgggccagcagatcgagaacgggtagctgcatggctcaacccaccaaccagtaacgcagtagcaggtaacaaccgaacgttagcgcgaggcccgcgctaacggtgccgccgaacgagtcatggggcagtttcaagttccaccccctgactggcctgtcgggcgatcagcgtgccctgcgggcgcgtagcttcctgcgccagcgccacggcctggcgaatcagctgatgatgtggagatttactgcaggccggatcggtgttggcaccattgccggtcagcagcaaggcctggcagcggcagccgccgaaatccttttccttttcgtcacagctgcggcagggttcgggcatccaggcgtcgccacggtagaggttgaataccggcgagtcgtgccagatctgctccagccgttgctgacgcacgttggggaaggtcaggttcttgaagttgctggcctgggagcagggcagcacgttgccgtttggcgcgatggtgacgtgaatcgcgccccagccgttcatgcaggcctttggacgaccttcgtaatagtctggaatgacgaagaagatggtcagccgatcaccgaaacgctcgcgtgccttatgtacctcgtcttcggctctctgcagttcggcatgggtcggcatcagcgcatcgcggttgagcagtgcccagttgtagtactgcacgttcgccagttcgagatactcgactcccaactcgacggcgaacgcgatgatctccggcacctgagcgatgttctgccgagtgatcggaacgttgagcaccatgggaaagtccatggacttgatcagccgcgccatgcgcagtttgcgctccagggcatcgacgccggccagctgacgagccacttcacggtcggttgattgaaaaccgagctggatgtggcgcagcccggcatccttcagggcgcgcaggcgcgcttcggtcaggccgataccggaggtgatcaggttggtgtagtagcccatgcggtcagcctcggcgaccagcgtttcgagatccttgcgcagcgtgggctcgccgcccgagaagccgatctgcatcgcgcccatggcacgggcctgggccattacatcgatccactcggcagtgctcagttcgtcctggcggtaatcggcgaagttgcgcgggttgctgcagaacacgcactgcagcgggcactggtaggtcagctccagcagcagccagaccgggttgccgctgccatcaagccttagctcggatc

SEQ ID NO: 80 - DNA, 22393 bp, Unknown
  From metagenomic library of CO182
tgcgcaaagctctcaatcaaggcctgatcgattacctgcaggcgtcgcctacccctttccatgccaccgagaacctcgtccaggcactgcaagctgccggctaccgtgcgctggatgaacgcgaggtctggcataccgaggccggtgggcgctactacgtcacccgtaacgactcggccatcattgccttccaactgggcagcaagccgcccgtcgagcacggtctgcgtctggtcggcgcgcacaccgatagcccttgtctacgagtcaagccgcaaccggagctgcaacgtcagggcttctggcaactcggtgtggaggtgtatggcggcgccctgctcgccccctggttcgaccgcgatctgtcactggccgggcgcgtcacctacagccgggatggccgcatcgaaagccagctcatcaacttcaaggtgcccatcgcgacgattccgaacctggcgatccacctgaaccgggaggccaatcagggctgggcgatcaacgcccagaacgagctaccgccaatccttgcgcagatcgccagccaggaaagcccggatttccgcgcactgctggccgatcagctggggcgcgagcatgggctagtcgccgatgtgatcctggacttcgaactgagcttttacgatacccaggctgcagcggtcatcggcctgcatggtgacttcatcaccggcgcccgcctggacaacctgctctcctgcttcgccgggttgcaggcgttgctgaacgctgagcccgaacacagctgcgtgctggtctgcaccgaccatgaagaggtgggttccacctcgctctgcggcgcggacgggccgttcctcgaacaggtgctgcgccgcctgctgccggaagaagatgacttccagcgcacgatcagccactccctgctgatctcggccgacaatgcccatgcggtgcaccccaactacgccgacaagcacgacggcaaccacgggccgaagctcaatgccggcccggtgatcaaggtcaacaacaatcagcgctacgccaccaacagcgaaaccgcagggtatttccgccatctctgcctggaaaacgaagtgccggtgcagagcttcgtcacccgtagtgatatgggttgcggctcgaccatcggccctattacggcgagccagctgggcgtgcgcaccgtcgacatcggtctgccgaccttcgccatgcattcaattcgcgaactcgctggcagccaggacctggcacatctggtgaaggtactcaccgccttctataacagcagccagctgccctgaacggagccgcgatgagcgggcccgcctgctcatcgcgatgcagtgatccgtctggatcagtacatggtcgcgtcaggaaactgcgctatcgatcaccagcgccaccttcccggaaacggtgttgctggcgagcgcggcgaatgccgcctctgcgtctccaatggcgaaggtttgctccagacgcggcgaaagcttgccctgggcaaacagcggccagactttctcctccatttctgccagcagccccgctttgtagtcggcatcccggctgcgcaaggtcgaaccaatcaactggatgcgcttggccagcagcccggcaagatccatctcggccttgcgtccacccataaggccgatcatcacccagcgcccgtccatccccaacagctgcatgttaagcgcggcgtacttggcgcccacgggatcgaggatcatgtcgaacgggccgaaatcgcgcagcgctccaagcgagtcgccacgcagcacgccaccctgagcacccagcgattcgcagtacgccagacgctcagccgagccgacactgacccagcacggattgccgaacgccttgcacagctggatcgccgccgaaccgacgccactcgcgccagcatgcaagagcaccttgtcaccggccagcagcgcgccaagccgatagagattcagccaggccgtggcgtatacctcgggaatcaccgctgcttcgtgcagcgtcatgccatcgggaaccggcagtgcgtggcgcgcatcgactaccacctcttcagccatgccaccgccagccagcagcgtgcacacgcgatcgccgaccttccagcggctgcgcccgtttacttcagcaatcacacccgcacactccaggcccaggatgtcggtaacacctgctggcggcggataatgcccagcgcgttgcagcaggtccgcgcggttcagcccagcggcagcgacgcggatacggacttcgccttcaccgcacgccggagccggtcgttcggcccactccagatgtccctcgataccttgcaatgccttcatgctgcctccatagtggttcatatctatgcccacccaactgatcgctcgctggccttctttgaccacctttaccatcgggcttgtgctttccaccgccggacggaaaccgaaccggcgcctactttagatggcctaatatgcgttattccctagccttacgtcgcccccaagccatgaaacgtacgctgacctgcaccgttctcgccgttcttttcggcctccatgcctccctggcgatggccaaagccgtcagcacgccggagaactgggactacctgcaacctgatcgtgaccaggtgattgcgagcctgaacgtcgtcgagctgctcaagcgtcatcactacaacaaaccaccgctgaacgatgcgcgctcggcgaagatcttcgacagctacattcagatgctcgacccgtcgcgcagctacttcctggcatccgacctcgaagagttcggcaagtggcgcaaccagttcgatgatttccttaaaggcggaaatctcgagccaggctttgccatctacaagcgccacttggagcggttgcagaatcgcctcaattacgcgctaggcctgctcgacaaaggcgtcggcagctttgatttcaccaaggatgaagagctgctgatcgatcgcgagaaagccgcatgggccaagaacatggccgagctcgacgacctttggcgtaagcgtgtcaaggacgaggttctgcgtttgaagctagccggcaaggagcccaaggccatcgaggagctgctgaccaagcgttacaagaaccagctggcgcgcctgaaccagacgcgcggcgaggacgtgttccagacctacatcaacgcgttcgcccagtcctacgatccgcatactcagtacctgtctccggataacgcggagaacttcgacatcaatatgagcctgtcgctggaaggcatcggtgcggtgctgcagagtgacaacgagcacgtcaagatcgtgcgcctggttccggccggcccagccgagaagagcaagcagctggcgccagcggacaagatcgtcggggttggtcaggccaacgacgaaatggtcgatgtgatcggctggcgcctggacgaggtggtcaagctcatccgcggcccgaaaggctcggtcgttcgcctggaagtcatcccggcgagcaatgcgccgaatgatcagagcagcaaggtggtcgccattacccgcgaagccgtgaagctcgaggaacaggccgcgaagaagtcggtgctgaaccttgagcatcagggccagaacttcaagcttggcgttatcgagatccctgcgttctacctggacttcaaggccctgcgtgccggtgaccagaactacaagagcaccactcgcgacgtgaagaaactgctctcggaactcgaagccgaaaaggtcgatggcgtggtcatcgacctgcgcaacaatggcggcggctcgctgcaagaggccaccgagcttactggcttgttcatcgatcaaggcccgaccgtattggtgcgcaacagcgatggtcgcgtggacgtgcttgccgacgaacaaaccggcgcctattacaaggggccgctggccgttctggtcaatcgcctctctgcatccgcatcggagatcttcgccggcgccatgcaggactatcaccgtgcgctgattctcggtggccagaccttcggcaagggcacggtacagaccatccagccccttaaccacggcgaactgaagcttaccctggccaagttctaccgtgtctccgggcagagcacacagcatcagggcgtgatcccggatatcacctaccctgccgatgtcgacaccaaggaaatcggtgagagtgcgctgccggaagcgctgccgtgggacagcatccgcgcggcaatcaacccggacatgaacccgttcaagccgttccttgccgagctaaaggcgcgccatgaggcacgcacaggcgagaacccggacttcgtcttcacccgtgatcgcttggcgcttgctcaggagctgatgcacgacaccacggtcagcctcaatgaagataaacgccgcgctcagcaggcggatatcgagaagcgccagctggcgttggagaacgcgctgcgcctggccaaaggcgagcagccattggccaaactggagaaggaagacgaaaccacgccgcataaggaaatggacaaacccaagcccgaagacgatgcgtacctttccgaaagtggacgaatcctactggactacctcggtctcagctcggcaatggccaagcactgacagcagacagggcgttcagctttaccaaagcggcatcgctccagcgcgggaaaatctagggccacagtcgtggccctttctctttagcggcagagagcgccatgatggtcaccaagccgttgaacacgctgagacacgtccgatcaatgcagacgcgccgtagcgcgatatttacagccccagctgagcagccttcgccttgtaactgtcggccttctgggagtcagcagccagaccgtgacccccggcgcgatacaactgctcgagccgaacggccgccagcggatgtcccgcttcggcggcctgggaccaccagcgagccgcctcgctgccatccggtccgtgcgacgcatcttcgctcaggctgacaacccccatctggtaggcagctttcacgtcgcccgccttggccgcaaggcgcaacaagcgaacaccctcctgcttggcgccatgacctcggccgcgaaaatacagaatatgcccgtagaagctttgcgcaccgacgtctcccagagccgccatacgcgcaaactgaccctccatccagctccagagtttcggttgctggacggcataacgggaagtcatcaacttgcgagcggtgaagtaaccgagcctcgcacgcagtttccacagcatcagtagtcttcctccggatattcgaactcgaacacccgcgccacttcgcctgcatgccaggacgcagcagcggtaccgtcaatggctccggagaagcgccccaggctcgcggcacactcgaaaaagcccggacgtggtaaacggctagcgccctgactgatgaccagcgcgctacgcagcgggcgcccactacgggcatcaagtgcggcaagatgctccagcgctgcggtcagtgtctgcattgcgggagttggcaactgaaggcgctcgaccagcgcccggtaggtcaccagatgccgctggcgacgtgcggcatcaagctcaccgagtaaagcctgccagtgctggcggctgatggatactgacgtcaagcgtccccctcccaaccggtgatttccaatgcgcgggccaatgcgcggcgaatcgccgtatcgggctcgcgctcgcctgcctcgattaacgccaggtaagccgggctgatgcctaccgcacgcgccagtacttccatggtgagccccttggcgtcgcgcagcatcggcaattggctcagcgaaggacgcggctgtgcatccggggaagcaggagctgctgcaggcggtcgcgctccgacagcgttgaggagtgcctggtactcgtcccatggcagaacggcgtattccggcgagccgtcacgcatgatgacctgtacattcatccgaatttcccttggcgtcttcgataagagggcggaatcttaacagcccacgccgctccttgaagctaccaagctgccgcacacatagcgaatcgggaatggtgccgcaaatgtccgacgagcgccgaccaacggatgaccaatgatttgctatgtctagacctgtggcgagttatcactttggggctcatccagcgcgggcaacctgagcaacccagcttggcgctcggctgactgcgcctgcctccacgctttgaacgcttccagctctccggaccatttgcgcattacccagcccaacacggccagatcatcgacaaatccgaagcccggtatccagtcgggaatggcatcgaggggcgacaggaaatacagcaggccagccactacggctatcaacgcattcggactaacggcccgatactcaccgcgccaccacgccacgcaaagcgcttgtagcaacgccagatcctctcgaaggcccttcagcaacccccgcttcgacgatgacttgcgtgccactgcaagcaacaatgcgggaatttttccgcgcttgataaggcgctgtgccagcggcatatatttcaggaaattccacggagctttcatcgactcaccttcagccagcgtcatccgtgacctcgaggacgttatccaccgaacctgtggataaccttgtgaacagattatggatgaccgccgcaaaagccctgcccatggggctgctcaacagatcggcgcttttttatccaacccagtaagacctttcaaatcaatcacttacgaaaaggcaaaaacagacaccaagagtcaaggcagaacatctattttgctattccgaatgtgcataaccgaggattgtcaatggcttcacaagcactttgactggtggttgcacagggcgttcggcgttacggatggacaagaggccggtccttgcgaccggccctgcgctggacgcttactgcacgctgagctggctacggattttttccagggttgccgagccgatccctttcacttcaagcagttcgtctaccgaactgaacgggccatgctcttcgcggtaatcgacgatcgccttggctttggtagcaccgatgcctttgagctcacgggtaagtgtggcggcatcagcggtattgaggttcaccgacgcctgggtgacggcggcaaccggtgcaggtgcgggctgagattgagtggcggcatgagcgccaaaggaaacactggcaagcacggcaaacgccgcagcggcaagaaaagccttgttcatggagatgtccttatccgagaaatgtctatgcgggacttcctgctccgcgtcaaccaatctagccgcctgtttgccgatgtcaaaaacgaggctgcatttttgccaacctcgtcaaactcctcagcgcatggcgttgaacaggttcagaccactgattttgacgtagctctgctgcgctgcctcgagaatgatggtctggaatgacaatctggaaagggcttcggcgtaatcgagttcgcgcagctcggcctgaacagacttgttcaccaatgtcacatcctcgttatcggtctgcgtagtctcgattacgttgagccgtgcgccgatgttaccgcgcgccgcgtctacgctgatcatgccatgatcgaggttggtaagcgctactgctacagcatcgcgtacgccggcattgccggaggatggatcctccaatgccttacgcaggttggaaatcgtctctaggatgccctgcttctgtacagtggggtccagctgaacctccactgtctcaccgccgacgggaatgccatcgaactggatgaccacgccgcggaaaaccagcttttcggtagttttatcctgctgatcaaccacgcctgaagcgagaacgagacttgggtcgattggcggattggcaaaatcaggcgcagctgccaaatcatagacgacgtagtcagtatcggacgtaaaccgcacgccgaccccagcagccggaaatggcggattgccgctaatggcaacctcatcctgcaccaagggcgccgacaccctaagcgtcgagcccggctgtccagtggtatccagactgctcacgtaacgtccagcattagtcacgttttcgaatatcgacttaccgctatcgctgatggctatattcaacgaactagcaatctgcagtttccgctgtccctcgtctccctggtagctatagctgccagcgccatcgcgcacaaacggctgggtctttccctgaaaacccgaaaacagatactcgccacgggcgttacgggtgttcatcagtgaaagcagttcgtcctcgcgctcagtaagctccgctgctatcgacttgcgatcgtcagcgctcaagcctccattacccgcctgcaccgccagctctcgcactcgctgcaaaacggtattcaccgaattgagggtaacttcctcctgcgtgaggctgttcttcgcggcggtcagattggagttgtactggctcaatacgttctgttgctgctccagctgcagcaggcgcaccgaagcgaccggatcgtctgccggcgtgagaatgcggttaccagtactgatctgctcctgcgtacgagtcgcgttggcatagttacgctgcaacccggcgacgccgttattgaacgcttgcacggtagaaatgcgcataggacgggcctgttacctaaaagagctgatcaatgtatcgaacagagagcgggcaacttgaatgatttgagccgaggcgttgtagtactgctcgaacttgatcaggtttgccgcttcctcgtccaggtttaccgccgagagcgaatcacggttatcggtcgcctgcttgagaattgccccagtcgcttcgctgtccatccgggcctgcgccgtcagcgtaccgacacgctcgaccagctcgccataaccatcggtgaagctaaagccggaaccagcgacaccaggggtcacgcctacggtctgcttggtctgcaggtccactagtttcaaggcattgcggttgtccgagacgccgttctggttgaagctgaacgagaaggtatcgcccgtcacgggcctgccgcttacggtgaactcgaaactgtattgctgcacattgggcgccgtacccgtagtaagagtcatgtttagcgtattggtctgtccggcggtgatgttcgaaggcgacagcgtgagccctgccggcgctggtgtcggaagtgccagcccgttgccgtcgtagctcagagtcagcccttcaaacgccgccgatagcgcagccgcatcgatgggcgatggaccagatagcagattcggctggccgatcactcctgtcccgctgttctgcaaggtgctctgggcacgcaccggtgctgcaaacgccagctggtcggcctgatccagcgtcgccttgatatcagaagcgccacgccgggtcggctgcaggctgaacttgtcgccaggcgccggcggcggattgcccagcacgatctgaaagccctggtcgcggccattcttgtcagtgatcgacaacgtaccgaccggattctccgtagccgtcatcagctggttatcgctcagccgccgtatcttgtagctgctaccgtcatactccatcaggtagtcgctggtgctgagctgactggtattggtgatgttcaggaccggttgtgcattgctgttgccagcaaacgcattgacacgcaacctggccagcgccgggtcgttgtagttaccaaacagcgccgaaccgacctgccccttgagatccagcccctgccccagctgcgtattaacctggtcgctcacggcgagtgccaggcggcccagggagttcatggtggaatccagcacttcctcgcgatagcgaatcagcccgcccagctcgccgccggtgatctgcgacgtgatcccctgccgcgagccgccgctgatgaactgcacttcatgccggttggggtcgccctgccctggcacgacttcgagacgcgccaccgtgctgccgacaaccagcggctggccgctgccgatgaagatgttgaagctcttgtcatcttgcggaacgacagtcacgccgatgtagcccgacaactggcgaaccgcctcgtcgcgagcgtcgagcagatcgttcggctgcttgccattggccgcagcgatggcgatcgcctcgttcaggctgccgatgctgcctgccagccggttcacctgatcggtgacagcggacatctgcttgttggtgaaattgttctgctcggagagccggtcatagaccgtattgaagcgccgcgccagcccctcggcctcggccagaaccaattggcgtgctgggatattcgccgggtcctcggcggcagtctgcaaggccgagaagaacttctgcagcgagggcgtgatgccggtggtagtgccggccagcaacgaatcgagctgattgatctggctcttgtaagcctccacatcagcactcagcgaagtactactacgcagctggctggtgaggaattcgctatagctgcggcgaacttccaccagcgtggtccccgagccgatatagccggcaccactgaactgtggtgagcgggtggcctgggtcgcatcctggcggctatagccaggggtattgacgttggtaatgttgtggccggtgatcgacaactgggtcttgctggcagccaggccggaaaggccaatgctcaataggtcagccatggtttagcctctggtccgcatcgcgggcaccgaattcgcgtcggcaacggtctgataggtctgcatcttgcgcgcgatctggctgatcttgcgggcgtactgcggatcggtggcatagccggctttctgtagttccttgacgaaacgctccgaatcgccggtgttgctcgcaacctggattgcggtccggtagcgatcattgttctccagcaggctgacgaaatcgtcgaagctctgctcgaatgaatcgtaggcgcgaaagcccgccttctcgcgggtggccttgccgttgacgtattcggtcgtcgtgacggtcgcggacgcacctttccagccggtcgccttgatgccgaacaggttgtggctgttgctgccgtccttctggcgaatcatggattttccccagccggtttccagcgcggcttgtgcgaccagaaaacgtggctcgatcccgaggcgctcggctgccttctctgccattggcagcatggtggcgatgaactcctgcgaggagctgaaacgcgtcttgctgggcgcgttcggagcactcttctccacgccgtttacggtcagcggcttgtctacgggcggcacgaacgcggtggccggcttccagtcgacgttgaccaatggctgcaccgcatcgccagccggcggaaccgcagtcgctgacacgttggcaacctggcgatcgctaagcttcccaggcgaggcgagcctgcgctggttgagcagccgtgaatcatctcgagcagattcgacgccagctgccggcttgctcggccaggctgcgccctcggtctgcgcaacctgggcgaatggattgttgcgcgtcaccgtttcggtctgtttgctcagttggcggaccagcacatccgccaggccgatgccgccaccttccttggacagactcaccgatagctgctggtcgtacatatcctgatactgcttgctggcctggctattcagaggattgtccttggccaggacctcggtagccgcacgcatcgacttgagcatctcgttgaggaacaacgactcgaattcctgcgcaaccttgcgcacgttctcctcgccatcgcggtctttgccgaccttgagctggctgagacgattgaggtcggtatagctgccgctatcgagaccgcgtgctccgctaccgagacgattttccatatcgctacccttagatcacgatcaggtcggcttgcagcgcgccggcctgcttcaacgcttcgagaatggccatcaggtcgctgggcgcagcgcccacctgattcaccgctcggacgatttcatccagcgtggtgcccgggccgaacttgaacatcggcttggcttcctgctcggctttgaccttcgagttgggcacgaccactgtctgcccgtccgagaagggttccggctggctgacctgcggctcctcggtgatggtcacggtcagactgccatgggtgacggcggcaggctgaacccgcacgttctggccgatcacgatggtgccggtacgcgagttgatgatgaccttggccacggcctggccgacttcgacttcgagattttccaggatcgacaggtaatcaacgcgctggctcgggtcgagcggcgcggtcacactgatcgaccctccgtccaacgcctgcgccacgccagggccgagcaggtcattgatctggtcgacgatattcttggccgtagtgaagtccggacgattgaggtttagggtcagtgtgttgccctgattgaaaccactcggaaccgggcgctcgacggtcgcgccaccgggaatgcggccggccgatggagaattgacagtaatccgcgagccatccgcgccacctgcatcgaaaccgcccaccaccagattgccttgggcgatcgcgtagacgttgccgtcgatacccttcagcggggccatcaacaggctaccgccgcgcagactcttggcgttgccgatggacgagacagtgatatcgatggtctgaccgggcttggcgaacggcggcagttcggcatggatcgacactgccgcgacgttcttcagctggatattgccaccggcgggcaccttgatgccaaactgggccagcatgttgttgaaggtctgcacggtgaacggcgtctgggtggtctggtcaccgctaccgttcaagcctacgaccaggccataaccgatcagctggttgctccgtacaccatggatggtcgcgacgtccttcagacgctcggcctgtgcgccagcgcagagcgtgagcatgcccgcgagcagaagcagttttttccacatgacatcagctccggtcagaagggccacatcgggctcatgaagaatcggtcgagccagcccggctggcttgcatcggcaaacgcgccggtgcccgaataagtgatacgtgcatcggcgatacgggtggacggaacggtgttgtcggtggagatatcgtccgcgcgaaccagacctgcgatacgcaccagttcgtcaccggtattgagcgtcatccacttctcgccgcgcacggcgaggatgccgttaggcagcacttcggaaacggtgacagtaatggaaccggacaggctgttgctctgccctgcctggccagagccggaggtgtcgcgcgacgcctcgtactcggcacccaggttcatcgagttgcccgtcagagggttggccatggacaccgcaccgccaaacagcgagccgagacctatgttcgcactgctgtccttcgacagtttcgacgtcgcgttcttgctggcctgggtccgctcgttgagggtgatggtgatgatgtcaccaacccgatgagccttgcggtcgtcgtagagattggtctcgaagcctgcctggtagatcgcgccattgttctgcgcagccggcaacggcgtgcgtggcagcaccggcgcgtagtacgggtcgttcggtttcggcgcgggagcaacacatccgaccagcgccagggcagaagacatcgacacaacaatcaacaaacggctcataaacacctcaagccatgacaggccatcgaaactactgcgagcagcacgaggcgtgcctgcccgtatacaacggcgcatacgcgatcagagctgctgcgtgacgaacgacagcatctggtcggcggtggaaatgaccttggaattcatctcgtaggcgcgctgggtggtgatcatgttcaccagttcctcgacgacgctgacgttggagttttccagggtgttctgcagcaccgtacccaggccgttgagccccggcgtgctgacctgaggtgcgccactggcagcggtctcgaggaacaggttgctgcccatggcctgaagacctgccgggttgatgaagtcggccgtctgcaaattgccgatgatctgcggctgcgggttgcccacggtggtgaccgaaacggtgccgtcttcgcccacggtgaatgtctgggtttccggcggaaccacgatggccggctccaaggcgtaaccgttagaagtcaccaactggccatcggagctcaggtgaaagctaccgtcgcgggtgtatgacaccgtaccgtccggcagtagcacctggaagaaaccacgaccattgatcgccatgtccaacggctgctcggtggtctgcaagctaccggcggtgaagatcttctgggttccggtcacacgcacacccgtacccagctgcagaccggacggcagttcactgtcctggctggattgtccgccaggctgccggcgaatctggtaaagcaaatcctgaaattcggcacggtcacgcttgaagccggtcgtggaaacgttggccaggttgttggaaatggtcgtcaggttcatgtcctgggcggacagacccgtcttgctgacccaaagtgctggaagcatgagctttctcctcgtgcgccgcgggcgccacgctattaactgagttgcagtacgcgcgccatggcagccgcatcatcttcggcggtgcgcatcatctttacgtgcagttcgaactggcgggacagcgccaggatggaagtcatttcggagaccgcattgacgttgctcgcctcgagaaaccccgacacgactcgtacgtttgcgtctggctcgacgggctggccatctttcaggcgaatcaggccatcggtacccttttccagctgcttcggatcggggttcaccagcttgatccggtcaaccgtaaccacgatgttggggttttcacccagcgctcggatgctgatggtaccgtcgtggccgacatcgactttctcttctggcggaatggcgatcggcccaccgttacccagtacaggcatgccatcggcggtgcgcaacatgcccagcacgtcaatattcaggctgccggtgcgcacgtaggcttcgctgccgtctggcgcctgcacggcaatccagccttcaccttcaatggcgatatccagatcgcgacccgtttcctgcagtgtgccggaggtgaagtcagtggcgggacgctcggacatggcatacacccgagccggatgactgtcgccaaagacctgcatggagcgggcctgttcgaaatcccggcgaaaacccgtagtggatatgttcgccagattgttggcatgggcctgttgtgcccgcgcattctggctggcaccggtcatggccacgtaaagcatcttgtccatcgacatctccgagacgcgagtttgacacttgctgatctgttggagatgaaaaatgcaaggcccgtgccatagccgacctgatagacaacagattgatttataagagttttataaagacaaagaaggcccgaatgggccttctttcagaggagtggcggaatactgccgccagcggcaatcacccctgccgcgccattaccgcagatttatgatggtctgggtgatcgcactctcggtctcgatggtcttggcgttggcctgatagttacgctgagcgacgatcaggttgaccagctgatcagacagttcgacgttggagtcttccagcgctcccgcctgcagcgcaccgagcgtgccggagcttggcgtacctactaccggttcgccggattcgaacgactgcacccactgcgtcttgcccaccggagtcaggccctggacgttggcgaagttggccagaatgatctgcccctgaaccttggattggccgttggtgtaacgcgcgaagatcacgccggtatcgtcgatctccaggccggccagctcaccagtggtatagccatcctgcgcaacgctgttcacggcgaaagcactggcgtactgcgaagacttcgagaaatcgagcacgatgccacccggattcgctagcgcaccgtttggcgaccagctagcaggcgtagcaccgttagagatagccgggatccaaccgccagtaggcggattgcccgtagcggagttcagcgtaactttccgatcaggcgaaacgctgaaaagtccagagccaccattatcgatagctgtcagcgcaccggaagcatcgaaggacagccccatgacgtaaggctgaggcggctcctgtgctggattggccggattgcgaccgtcgatgagcaccttcatgtcccaagtattggcactggtcttgacgaagtactgcgtcatgacgtgcgcattgccctgggagtcgtagatattcagcgaagtggagctattgtaggtcgtggggtcggcagggttaaacgtgccgttggcggcagtaagagctgctgcctgattgactggcaacgccctcgcagcgtttccggcggcctgcgcattggaaatatttgttgcgttgacgagcgcagcagcgcgtgcagcctcagcaagcactgggtcgctgctcaccgcaaattccgcgtcatatgcagtctgcccggcggtggtgagcgaggtgttataagccgcgtcatacgctggctgcaatgaagcgtcataggcagactgccaagtaactggaggcttctgcgtcgagttgagattgaacgccgtatcgatcttgctggtcgctttcggtgcctgattggtagtttgaatttgcagatcaccaaccacaccattctgcagattgccattcccgtccactgggaacccttgcagcttatagccgaagttgtcgaccaggaaaccgctgcgatccgtaccgaaataaccggcacgggtataacttaccgcaccgttgttgctgacctggaaaaagccgttgccgttgatggccaggtccagcgcgttctgggtgtagttgatattgccttggttgaactgctgggagatgttggacatcaacacgccgctaccctgcgggttcttgcccgtgccgagcacggaagccgcatacacatcggaaaactccgcgcgcgactgcttgaagcccacggtgccagcgttggcgatgttgttaccggtgacgttgagatccttgctcgcggcacgcaggccgctaagaccgatattgaaggacatgaatcgctcctttgccgagagtgcggcggttattgtccgatgatctggacctgggagaggccgatgctgccgatgccggcaaggttgagcatcagctccccgccgttctgcccaagcgtgacgctgtcgacgttcgccggcagcaaggtgtaaagccctttggtttcgccctgataggtagcctgcgcctcgaagcgataggtgccgggcggcaagacattgccgctggaatccttgccgtcccacatgaaggaaatgttgccagcttgctgctggcccatgttcacacgcccgaccgaagcacccgtactgtcgtaaatattgacgaatacattgctgctggaagtcggcaataccaggcttgccttgaaagtttcgctggtatcgaccacagccttgtcggtcggcacgatgaccttgcgccctaccagcgacgaggcctgcagcgcctgggacgactggtagccggacaggatcgtctgcatgctcgagttgagcttctcgacgccttccacggtgctgaactgcgccagctgaccgatgaactcgccgttttcctgcggctccagggggttctggttgttcagctgggccaccagcagttcgagaaactcgttcttgccgaggtcgttaccctttgcttcgcgcttttcgccgaactggtactgatccagtatcgagccggttccgccgacgccgttcgtagtgctcataagtgcgctctcgtaactatcactgacccagcgtcagcactttctgcaacatggtcttggccgtgttcatcagctcggcgttggtctggaaggcgcgactggccgaaatcatgtcggccatctcttccaccacgttgacgttcgggtaatagacgtaaccggcctcgtcggcagccggatgattgggctcgtagcgggcctgcagctcgctctggtcctcgactacacccagcacctgaacaccaaccccggcctggtcctgaccggcgaacagtgactggtcgggctggccgttggcctgctggaagaccgtggcgaataccggatggcgcgcccggtaggtctgatcgacgcttgacgatacagtctcggcgttggcgatgttgctggaaatggtgttcaggcgggtgctttgggcactcatgccgctgccggcaatattgaatacgctgctaagggacatgggctactccttcattcgccgcgcagggcgctcataagccccctgaacttgctgttgagcagggtaaagctcgcctggaagtccacggcgttcttcgcatagttggattgttcgatctgcagatcgacggtgttctgatcaagcgaggggtgtgcgggcgttcgaaagcgcagggatgcatcagcgatttccagcccttcggctgcgatatggcggtcgctggtccgcgtcacgccgaatccaccctggctgcgcgccgactgctccgccagcacactgccgaaatccagatcccgtgccttgtagttaggcgtatcggcattggcgatgttgttggccagcacctcggcacgctgcgagcgaaagccaagcgccttttcatggatacccaatgccttgtcgaaactgatgctcatgatctggacctctgccggatacaagtctgcttgcgcaaactccagcaaagcccatgccattacatgcaacctcttgatttacaaggcttggcgtcgcgacaacgaacgtcagggtgtcaaaagcggcaagcctttaccgcttggttgccacaaccgccaccttgcatgacggttttctgccgcgaggaacagcagtcatttcgccttgtagatgatgcccgggctgcattgaaccatctggtagagctcgggaagcccattaagggcttccgaagcccccagaaagagatatccgccagggcgcagcgttgcatgaatacgcttgagaatgtctttcttcacatctgcggagaaatagatcagcacattccggcagaacacaatgtcgaatttgcccagcgcggcgtagctgtccagaagattctggaccctgaactcaacccgcgagcgaatcgccggctttaccgcccaacgccccggcgccttaacgtcaaaatagcgttgcagacggtcgctggacagaccacgcgcaatagccagactgtcgtattcagccgctttgcacgcggcgagcatggtcccggaaagctccgtggcaacgatctgcaccccggtcttcgcctggctggggttgctgcgctcgtactcatcgatcgccatggatagcgaatacggctcctgccccgaagagcaggctgccgaccagattcgcagacgctggccggagccggtcttgagcatttcaggcagaactcggcttttgagtacctcgaacgggtacgtatcgcgaaaccagagggtttcgttggtcgtcatcgcatcgacgaccagttcccgcaaccctccgcgcggctgtgcctggattttccgcaccaagtcgccgagcgtcttgatgccctgctgctccatcagcttgttcagccggctggacaccaaatactgcttgttgctgcccagcagaatgccgcacgttttctcaagaaatacccggaactgctcgaaatccagatcgactgacaccaataaagcctcaccatcatgagaggagctagcctcagtttgcatccgcctgcctgatccgctcggccacgcgggcagcgagatcgtcaggctggaacttggcgaggaaatcatccgcgcccgcccgcttaaccatgttctggttgaacacaccggaaagggaagtatgcaggagtatatgcataccctgcatgcgcggatcgtgtcgcacctcggtagtcagggtatagccatccatttccggcatttcaatatcggaaatcatcatcaggaattcttctgccggcttcttgccttcgtccgccatccgcttgagatagttcagcgcttctcgcccgtcgttcaatttgatcacctcgatgccgatattttccagacagcgagtgatctgcttgcgcgctaccgatgagtcgtcgacgatcagtacgcggcaggagagcgccttggcccgggtgtccgcatcaaccacctcaggggagacttcctccgaggtaggcgccacttccgccagcactttttccacgtcgatgatctcgaccagcttgttgtcgatgtgggtgaccgccgtcagataatgatcgcgccccgcgcctcttggcggtggcagtatcgcctcccagttgaggttgacgatccgttcgactgagctcaccagaaaaccaagtgttcgattgttgtattccgtgatgactgcaaaggagttctgcaggtccatcagcgccgacttgcctgttgccagcgagagatcgaggatcggcagcgtagtgccgcgaatgctcgcgaccccgcgcaccacccgtccacatttcggcatgatggtcagacgcgggcactgcaaaacttcgcgcaccttgaacacgttgatcccataaagctgctcgccctcgagacgaaacagcaacaactccagacggttctgccccaccaattgggtacgctggttaaccgaatccagtacaccggccatgccagtattcctctctgcttgcagataattggggccagacgaatattagacgcggcacgccccttgctttggttgggatatgaacgtccatatgaccattttccggcgcagtcgccagatgctgtgcggctacttgctactcacagcgctgtgcgcgatgagtcaattcgcgcacgcatcaaccatgtcacaccctgatcagcttatcgacgtgactgagcagtttcttgagcgcgcagtggtggactatttaagtcgcagcagcatcgacgcgcgccacgaaatcgcggtcagccgcctggaccccagactacgcctgaatcaatgcgaccagccgctcgcagcgagcttcgccaactctgcgccccccataggacgagtcacgatacgggtaagctgcgaagggaatagcccctggtcagtgttcgtcccggcgcaggtccgactctaccgcgaggtggtcgtcgccaatcgatcattactgcgtgacacggtattagccgacgcggacgtgagtctcgccgagcgcgacgtgtcgaacctcagccagggctatctgacgcgcctggatgaagtgctgggcaacaagctcacccgccccgtacagccggatcaggtgatcgcacccaatctgatggaactggcgaaggtagtacgaaagggcgatcaggtcgtcattacagccaggagcggatccatcagcgtccgaatgcctggcgaggccatgacggatggcgtaccgggcaagcagatccccgttaaaaaccagcgctctggtcgaatcatcaaagcccgcgtcactggccccggccaggttgaagtcgcaatgtagctgcaacgtgcctgacgcactttttcggtgtgccatccggaaaaaaaagctaaagtttgctccattgttgccgaacacatggcaagcgtcctgattccttcgaggtttgcatcatggtcatcgacttcaatcgaccgaacagcccattgaacgcccccagcgggcgcagcagtgtgcaaggtaacgagcgtaccaccggcaccccagcagagcctgctggcaacacgccaaaaaccggcaacgcgagtgccagcattggtgacaccgtacaactgagccctgaagcccagcgcctgcaacaggcgaccgacaagctcaacgagcaacctgcggtcgatcaggagcgggtttccaagcttaagcaggccattgctgacggttcctatcaggtcgacagcaagcgtgttgcagccaagctattggctttcgaaacgcagcgctgagcctgtcacactcgcgaagatgcccagagcctgaaatgaacgaaaccaccctgcttgagcagctgaccgatgatatcggcatagcccgcgaactccttgagctgatcgaccaggaattcaaggcgctgagcgaccgcaacctggccgagctggaagtgctgctcaccaagaagcagccgttgcttgccctgctcggccagcacggagcccaacgcagccagtggctgatagatcagcagctgagcgctgatcgtgcggggctggaaaacgccgccagcagatctcgagaaggcaccagcattctggagaaagcccagctgctcgaagctgagctcgagaactgtcgcagcgccaacgagcgcaacggccgattgatccgcgcgaatcagggggcacttggaagcatgctaggcatcctccaaggcaaggacgacacgcccagcctgtatgacaatcgcggcggagcctccagaaacaagcagcagcggcccctgagccaagcctga

SEQ ID NO: 81 - DNA, 11477 bp, Unknown
  From metagenomic library of CO182
taccaacgtttgtccggggctgtatccagcaggggccgcagacgttctgcaatcgcttcacgcgcgcggaagatccgcgagcgcaccgtccctatcgggcattccatgatgttggcgatctcctcgtagctgagcccttcgagttcacgcaacatgatggcagtcctcagctcctcgggcagcgcctccattgcctgatccacggtttcgccgatctggcgcgtcatcatcagccgctcgggcgtattgatgtcccgcaactgatcgccatcctcgaaggtctcggcctcctcggagtcgaaactcgtggaagtgggcgctcttctactctgggacaccagatagttcttcgccgtattgatgccgatccggtacaaccaggtatagaacgcactgtccccgcggaacgaacccagcgcacggtaagccttgatgaaggtttcctgcgccacgtcctcgacttcggcaggatcgcggatcaggcgcgacaacagccggttcagcttgcgctggtacttggacaccagcaagccgaaagcctgtttgtcgccgcgctgtacgcgctcgacgagctgctgatcgagcacacggtcgctcatggggtgaggtgttttcccggatattggaatgacaaaacacccggattataagcgagccgccgcaggttctgcagaaatcggaggtactcgaaaagacacgcccccctgcaattagttcatgcctgctccggctgccggagcgccccgcgatcggcctgcagcaccgacgctcgccgcaacagccgtgcatgctatatttccgcacttctctcgagtcgggtgacatcttgctcaaacagtacgacgtactcattcttggcagcggcaccgccggccagtccatcgccctgcgcctcgccgacaccctgcgagttgcgctcgtcaccaagcgcgagctctccgacagcgcgagcaactgggcccagggaggaatcgctgcggttctcgacaccaccgacagcatcgaagcgcacatccaggacaccttcactgccggtgccgggctgtgcgatccgggcgcgacccgtttcgtggtcgaaaatggcaagcgcgcgatcgactggctgatcgagcgcggcgtgcccttcacccgcgaacccgactcggaattcggctaccacctgacccgcgagggcgggcactcccaccgccgcgtcatccatgccgccgacgccaccggcgccgcagtgcagctgacactgagcgcccaggtgcgcgcccaccccaacatcgacatctacgagcatcacatcgccgtcgatctggtgctcggcgacaaggtcggacagccgggcgagggctgcctcggcgcctacgtcctcgacatcgccgcagacgaggtcgtcaccttcagcgcccgcaatacggtgctcgccaccggaggcaccggcaaggtctatctgtatacgaccaacccggacgtggccaccggcgacggcgtggccatggcctggcgtgccggctgccgggtggggaacatggaattcatccagttccatccgacctgcctgtaccaccctcaggccaagtccttcctgatctccgaggccgtgcgcggcgaaggcggcctgctgaagctgcccgacggcacccgcttcatgcccgagcacgatccccgcgccgagctcgcgccgcgcgacgtcgtcgcccgcgcgatcgacttcgagatgaaaaagcgcggcatcgactgcgtctacctcgatatcagccacaagcccgaagcctggctgcgcgagcacttccccaacatccacgcgcgctgcctggaactgggcatcgacatcagccgcgagccgatcccggtcgtgccctgcgtgcacttctcctgcggcggcatcgtcaccgacctgtccgcccgcaccgacgttcccggcctgtacgccgtcggagaatccgcattcaccggcctgcatggcgccaaccgcctggcaagcaactccctgctcgaatgcctggtgttcggcgaggccgccgccggggacatcctcgccaagcctcacgtgctgccgccggcgttacccgactgggacgagagccgcgtcaccgacgccgacgaggaagtggtgatcgcgcacaactgggcggaactgcgccgcgccatgtgggactacgtcggcatcgtgcgcacgaccaagcgcctcaagcgcgcccagcaccgcatccgcctgctcgagcgcgagatccacgagttctataccaacttccgcgtcagcaacgacctgatcgaactgcgcaacctggtcacgaccgccgacctgatcgtgcgctgcgcgctgcggcgcaaggaaagccgtggcctgcacacctcgcgcgacttccccggcatgctggcgcgcgcgcgcaacaccgtcctgcgtccgcggctagcacgaaagaaagcgggaagctgaaccgctatccttttcgcgccggtgcatgccagcagcgcatgcacgcgctccgccctcaccgtgccgcgaatggccgcggatcagacaccggcgtcgccgcgcagcgcctggtggcgcagccagatccgcagcccccgccactgcgcagccggcaggttcacgggcagaagcatcagtcgcctcccgcgctccacgccccgcccgtgccggggcggcagtggcatgccgtcgcccgcgtccgccgccgggccgggtcgaagatcgagccacagcgcccagccgagatcgacggcatcggcaccgactcggcacagcccccgctccccgccactcgacacctccaccgccccgtcctcgagcagcaccagcgtggtcccgcgcttgcccagttcggcgcggatggcgcgcagcaaggaggcgatgagcagcccccaggccactgcggccagggccacctgcccctcgggacctcccgtcggcatcgggaacagggcatgaaaaagcgccagtgcagccgcgacatgcacggccagcactgacgccagcacccctcgcgaaggagagagttcgatgctcagcggccgatgcatggagcgggcgccacatgcatcggcgcttcagacgcggcggaagacgagtgtcccgttggtgccgccgaagccgaagttgttcttcagggcgacgtcgatcttcatctgccgcgcgacgttggcacagtaatcgagatcgcactccgggtcctggtcgaagaggttgatcgtcggcggcgaaatctggtgatgcaccgccaggacggtaaacaccgattccaggccgccggccccaccgagaaggtggccggtcatcgatttggtcgagttgaccacgagcttcttcgccacatccgcgccgaacgcgagcttgatcgcatcggtctcgttcttgtcgccgagcggcgtcgaggtgccatgggcgttgagatagtccacttcgtctggattgaccccggcattccgcatcgcgttgatcatgctgcggcgcgggccatcggtgtccggcgcagtcatgtggaaggcatcgccactcatgccgaaaccggcaacttccgcgtagattttcgccccgcgcttgattgcatgctcgtactcctcgagcaccagcacgccggcgccttcgcccagcacgaaaccgtcgcgccccttgtcccagggacggctggcggtggcaggatcatcattgcgcgtggacaaggccttggccgaggcgaagccgccgatcgccagttcggtgacggtggattccgcgccgccgcacaccatcacgtcggcatcgccgtattcgatcatccgcgcacccattccgattgcatgaagcccggtggtgcatgcggtcaccaccgcaaggttcggccccttcaggccgaacaggatcgagaggttccccgagatcatgttgatgatcgtgccgggaatgaagaagggggaaatcttgcgcggaccgccgccgaggaaatcgttgtgggtatcctcgatcatcggcaggccgccgatgcccgaaccgatgttgacaccgatgcgatcggcgttggactcgtcgacctcgatgcctgaatcgcggatcgcctggatccccgcagccatgccgtaatggatgaagacatccatccggcgtgcctccttgggggaaagataggcggcgacgtcgaagtccttcacttcacccgcgatgcgcgacgcgaaactgctggcatcgaaacgcgtgatcgggccgacaccgctcttgccggcagtcaggttttcccaggcctcgggaacagtattgccgaccggcgagatcacgcctagaccggtgacgacgactctacgacgcgacacgggcaactccgttggaatcaataaggaagaattagagcctgcccggaaccgcggagactgcagttaccggacaggagacgctggaacagcgcgtgtactgcttacttcttgaggtgggcgttgacgtagtcgatcgcctgctggacggtggtgatcttctcggcctcttcgtccggaatctcgcactcgaactcctcttccagggccatgaccagttccacggtgtccagcgaatccgcgcccagatcatcgacgaacgaagattcgatcttgatctccgattcgttcacgccaagttgctcagcgacgatcttcttgacgcgctgttcgatgttctccatgaaccaactccttcctgagggtgacaggtgtatttgaaaaaagccggcgtattctaccaaaacgccggggaaccgctatcctgaaccttgatcaggacatgtacataccgccattgacgtgcagggtggtccccgtcacgtaagctgcggcaggtgatgcgagaaatgcgaccgcgccggcgatctcttccggacgcccgaggcgccccagggcgatactgcccaggagcgcgtcgcgtgccgcctcgggcagcgcgcgcgtcatgtcggtgtcgatgaatcccggcgccacgcaattgaccgtgatgttgcggctgcccagttcgcgcgccagcgcacggctcatgcctgccaccccggccttggccgcggcatagttggcctggccgggattgcccgcgctcgccaccaccgaggtgatgttgatgatgcgtccgctgcgcgccttcatcatcccgcgcatcaccagcttgctcatgcggaagacggcgcgcaggttggtgtcgagcaccgcatcccactcctcgtccttcatccgcatcgcgaggttgtcgcgggtgatgccggcgttattgaccaggatggcgatcgggccgaagcgcttttcgacctcgccgacgagcgcctcgcaggccgcggcgtcggtgacgtcgagcgccatcccggcccccttcagacccgcctcggtgacagccttttcgatctccgccgcaccggactccgacgtcgcagtgccgatcacggtcgcccccaggcgggccagttcgagcgccacggcacggccgatgccgcgcgatgcgccggtgaccagggcgatctgcccttcgagtgaaaaactcatcccttacctcgttgccgcaatcgattcttccaggctcgccgcgtcgtgcgccgagccgccttccacttccttggcgatgcgcttggtcatccccgccagcaccttgcccggaccgcactcgatgacgtggctcatgccgcgtgcggccatcgcctgcaccagctcgatccagcgcaccggcgagaaagcctggcgcaccagggcatcgcggatcttctccggctcatcatagatggccacatcggcgttgttgatgacgtcgatttccggcttcgaaatcgtcacgccggccaggcgccctgccagacgctcagccgccgggcgcatcagcgcacagtggaacggcgcggacaccggcagcagcacggcacgcttggcacccttggccttggcgatcgcgctcgcacgctcgaccgcggccctggcaccggcgatcacgatctggccgggggcgttcaggttcgccgcctcgaccacctccccctgcgccgcttccgcacaggcttcgcgcaccgcatcggcttccaggcccatcaccgcagccatcgcgccttcgcccgccggcaccgcttcctgcatcgcctgagcgcgaaagcgcaccagcggcaccgcgtccttgaacgccatcgccccggccgcgaccagtgcggagtattcacccaggctgtgccccgcgaccatcgccggcttcgccccaccgcccgcccgccaggcgcgccaggtcgcgacccctgcggtcagcatcagcggctgggtgttgacggtcagggccaggcgctcggccgggccgtcgcagaccatcgcccacagatcctcgccgagggcatccgacgcctcggcgaaggtgtcacgaatcacggtcgaatccccatacgcagccatcatgccgacagactgcgacccctggccgggaaaaaccagcgcaaatgccatgcctgctctccgcttgtcagaaatgctggtgaaaaatcagaaatcgatcagggccgcgccccaggtgaaaccgccgcccacgccttccaccaccaggcgctggccgcggcggacctggccgctgcgcaccgcttcgtcgagcgcgagcgggatcgaggccgccgaagtgttgccgtggtgatcgacggtggtgacgacgcgctccatcggcaggccgaggcgcctggcggtcgcctggatgatgcggatgttggcctggtggggaatcagccagtcgacgctgtcggccggcgcaccggcctgctccagcacttcctgggcaacatcgccgagcaccttgaccgcgaatttgaacactgcctgcccgtccatgcgcaggaaagggtcaccgatcacctgacccgaagcgacgccgccgggcacgcacaggatcggatggtggctgccatcggcgtgcagcgcgctggcgcggatccccggctgcgtcgaggcctcgagcacgaccgcgccggcgccgtcgccgaacagcacacaggtggcccggtccgaccagtcgaggatgcgcgagaacacttcggcaccgatcaccagggcgcgcgtgtggctaccggagcggatgaacttctccgccacagtcagcgcatagacgaagccgctgcacacggcctgcacgtcgaacgcggggccgccgttgcggatcccgagcttggactgcaccagggcggcggtactgggaaagatatagtcgggggtcgaagtggcgacgatgatcaggtcgatgtcgtcggcctcgcaaccggcggcttcgatcgcgcgctcggcggcgacacgcgccagatcgctcgctccgacatcggcggcggcgaggtaacggctgcggatccccgagcggctgacgatccattcgtccgacgtgtcgatgccgcgcgcgaccaggtcctcgttgctcaccgggttgcccggcagacagctgccggtgccggcgatccgtgcgtagatcatgccttcacctcattcatgctcgccatgcgctcggaaatgcgctcgatgagccggttggatgcggcctcggctgcacgcgacagcgcgttcgcaaaggcgagcgcatcggccgagccgtgacttttgagaacgacgccgcgcaaaccgagcagcggggcaccgttgtacaggcgatggtccacccggcgcttgaagcgcttgagcaccggcagcgcgaccagccccatcagcttggccggcagggagcggccgaactcttccttgaggaaggcgcccagcatctgggccagtccctccgaggtcttcagcgcgacgttgccgacgaagccgtcgcagacgacgacatcgaccgtcccctcgtagatgtcgttgccctcgacgttgccgtggaaattcaggccgctgccgcgcagcagttcacccgcctccttgaccacgtcgttgcccttgatcgcttcctcgccgatgttcagcaaaccgacgctggggcggtccttgtgttcgatcgccgccaccagcatcgctcccatgatgccgaactggagcagatgctcggccgagcagtccacgttggcgccgaggtcgagcatgtaggtgtggcccttcagcgaagggaggatggtggcgatcgccggccggtcgatgcccgccagcgtcttcagcacgaagcgcgaaatcgccatcagcgcgccggtattcccggccgacacggcggcatcggcagtgcccgccttgaccaggtcgatcgccacccgcatcgaagaatccttcttcgtgcgcatcgcgatcgcgggcggatcgtccatctccacgacttcggaagcgggccgcaactgcaggcgcgaaccgaactcggccgctgccgtgccgagcaggggccggatcgcctcctcccgccccaccaggattgcattggcatcggggtggctgcgcaggaaggacagcgcagcaggcacggtcacgaccgggccgtgatcgccacccatgcaatcgaccgcaatggtgacacccatcggcatctcgcgtgattcagtcggtaaagtcggaaaaaaagcggcgcaggcgcaaagcgcactgcgccgccctcatgcgtgcgggcagcagaattactcgcccttgaccttcaggaccttcttgccacggtaaaagccattggggctgatgtggtggcgcaggtgcacttcaccggtggtcggttccacggccagcgccgggccggtgaggaaatcgtgcgcacgatgcatgccacgcttggaaggggacttcttgttctgctgaacggccatgagaaatgctcctaaaacaaatatcgcgcctatttcgcgctgggactgcctcgcagcgacgccagcgcagcgaaaggcgattctttcgacgccccccccaccgggcggggggcatcacaattttcgtgccgcggcgcgaccggcagcgccagcaggatctcgtcttcgagaagcgccagcgcatcgaactcgtcaccgacttcgatcgcatcgaactcgtcgttttcaagctcttcttccgggatcggctgcccagccctgaccagttgcaactgcgtatcgagcttgagcacccacgcaaggccgcccagacagcgctggcaatacagatcgagctgcccgctcgcggtcaggcgcaagcgcggctctccccgggccacttccccgaccagcgaaccttccagcttccagcgcaccacgccttcggtcgaggcaaggacatcgctcaagcgcagcaaatccgccacagcgacctcgccctgaatcgagcgcgcctctgcggcaaacctgaaagggtcggagatgactctcgacgggatgccttgttgcgacataagccgcgcatgatattattttttcgatctttgtgtaaagccatcccgcatcagcccgcctgagcaggcgagctgccggcaacacaaagtcgaccgccgttcaggtcccgcgcggcactgccccccccttcttcgcccctttcccttcgctgccatcccatttcgccccccgcgccatccatgaacctcgtcctcgcctcgacttccgcctaccgccggatgctgctcgagcggctgcagctgccgttctcgaccgaccgccctgaaaccgacgagacgccgctgcccggcgaacaccccaccgccaccgcggagcggctggcggccgagaaggcgcgcgccgtcgccgcacgctggcccgacgccctcatcatcggcagcgaccaggtcgcctgcctcggcgacgagatcttcggcaaacccggcaccgaacaacgcgccatcgcccagttgcagcgcatgcgcgggcagacggtgaccttccataccgccctcgccgtactcaacacccgcagcggccggctgcaggtcgaaggcgtgccgacgcaggtccgcttccgtccgctgagcgacgacgagatccgccgctatgtcgccaaggaacgcccgctcgattgcgccggcagcgccaaatcggaaggactggggatcaccctgctcgacgccatgcccggcgacgaccccaccgcgctgatcggcctgccgctgatcgccctcgcccgcatgctgcgtgccgaagggctggagctgccgtgagccaggttcgagtcaccccgcccgccccctcgacagggacgctttacctcatcccggtcgccctcggcgaggcgccctgggcggcgttcctgccggcgcaggcgcagaccatcgccgccggcctgcgccacttcgtggtcgaaaccgcgcgcgctgcacgcgcccacctgaagcagctcgactacccgcacccgctgcgtgaaaccgacatccgggaactgcccgccgatccgcaggccgccgacaccgccctgctcgacgccctgctcgctcccgcgctaaacggcaccgacctcggcctgatgtcggacgccggctgcccggcggtcgccgaccccggcgcccgcctggtcgcccgcgcccacgcgctggggattcgcgtcgtaccgctggtcggcccctcctccatcctgctcggtctgatgggctccgggctgaacggccagagcttcgcctttcacggttacctgccggtcgatgaagccgggcgcgacacggccctgcgcgcgctcgagagcgaatcgcgccagctcgggcgcacccagattttcatcgagaccccgtatcgcaacgagcgcatgttcgacgccctgctcaagctgctgcggcccgaaacccgcctatgcgtcgcctgcgaactcaacaccgcaggcgagctcctcctcacccgcagcatccgcgactggaagaaagcgccacacccggcacttgccaaacgcccggcgctgttcctgctcctggcctgacctgacctccgtagccgaaaccggcgccccccatcagcaagcgcgcggccacagccggcacgccggcgcgggcgtgcccgctcaggcgtgctcgaacagccagcgcaccagctcgtgcggccgatgcacgcaggccagcggcgactcggcctccagcgccgccaccggatgtgcgccgaagctgaccgcgagcgcggccgtgccggcattcttcgccatctgcagatcgtgcgtggtgtcgccaaccatcagcgtgcgctcgggctgcacgcccagttcgtccatgagctgctcgagcatcgccggatggggtttggaaaaacactcgtccgcgcagcgcgtgctgtggaaataagtgccgagcccggtctggccgagcgcacggtcgagcccgacccggctcttgccggtcgccacgccgagcatccgcccgcgcccggcgaggccggcgagcatttcggcaaccccttcaaacagcaccagctcatggtcgcgcgacaggtagtggtgacggtagcgctcgaccatgcgcggataatcggcttccgccagctccggcaccgcatggcgcaacgcgtcccccagccccaggccgatgacgtagcgcgcacgctcgtccgacggcgccggcaggccgaggtcgcacgccgccgcctgcatcgcacgcacgatcgccgcggccgaatccatcagcgtgccgtcccagtcgaagacgatcagatcgaagcgctcagtca

SEQ ID NO: 82 - DNA, 24649 bp, Unknown
  From metagenomic library of CO182
atgcgcaaagctctcaatcaaggcctgatcgattacctgcaggcgtcgcctacccctttccatgccaccgagaacctcctccaggcactgcaagctgccggctaccgtgcgctggatgaacgcgaggtctggcataccgaggccggtgggcgctactacgtcacccgtaacgactcggccatcattgccttccaactgggcagcaagccgctcgtcgagcatggtctgcgcctggtcggcgcgcacaccgatagcccctgtctacgagtcaagccgcaaccggagctgcaacgtcagggcttctggcaactcggtgtggaggtgtatggcggcgccctgctcgccccctggttcgaccgcgatctgtcactggccgggcgcgtaacctacagccgggatggccgcatcgaaagccagctcatcaacttcacggtgcccatcgcgacgattccgaacctggcgatccacctgaaccgggaggccaatcagggttgggcgatcaacgcccagaacgagctaccgccaatccttgcgcagatcgccagccaggaaagcccggatttccgcgcattgctggccgatcagctggggcgcgagcatgggctggtcgccgatgtgatcctggacttcgaactgagcttttacgatacccagcctgcagcggtcatcggcctgcatggtgacttcatcgccggcgcccgcctggacaacctgctctcctgcttcgccgggttgcaggcgttgctgaacgctgagcccgaacacagctgcgtgttggtttgcaccgaccatgaggaggtgggttccacctcgctctgcggcgcggacgggcccttcctcgaacaagtgctgcgtcgcctgctgccggaagaagatgacttccagcgcacgatcagccactccctgctgatctcggccgacaatgcccatgcggtgcaccccaactacgccgacaagcacgacggcaaccacgggccgaagctcaatgccggcccggtgatcaaggtcaacaacaatcagcgctacgccaccaacagcgaaaccgcagggtatttccgccatctctgcctggaaaacgaagtgccggtgcagagcttcgtcacccgtagtgatatgggttgcggctcgaccatcggccctattacggcgagccagctgggcgtgcgcaccgtcgacatcggtctgccgaccttcgccatgcattcaattcgcgaactcgctggcagccaggacctggcacatctggtgaaggtactcaccgccttctataacagcagccagctgccctgaacggagccgcgatgagcaggcccgcctgctcatcgcgatgcagtgatccgtctagatcagtacatggtcgcgtcaggaaagtgcgctatcgatcaccagcgccaccttcccggaaacggtgttgctggcgagcgcggcgaatgccgcctctgcgtctccaatggcgaaggtttgctccagacgcggcgaaagcttgccctgggcaaacagcggccagactttctcctccatttctgccagcagccccgctttgtagtcggcatcccggctgcgcaaggtcgaaccaatcaactggatgcgcttggccagcagcccggcaagatccatctcggccttgcgtccacccataaggccgatcatcacccagcgcccgtccatccccaacagctgcatgttaagcgcggcgtacttggcgcccacgggatcgaggatcatgtcgaacgggccgaaatcgcgcagcgcttcaagcgagtcgccacgcagcacgccaccctgagcacccagcgattcgcagtacgccagacgctcagccgagccgacactgacccagcacggattgccgaacgccttgcacagctggatcgccgccgaaccgacgccactcgcgccagcatgcaagagcaccttgtcaccggccagcagcgcgccaagccgatagagattcagccaggccgtggcgtatacctcgggaatcaccgccgcttcgtgcagcgtcatgccatcgggaaccggcagtgcgtggcgcgcatcgactaccacctcttcagccatgccaccgccagccagcagcgtgcacacgcgatcgccgaccttccagcggctgcgcccgtttacttcagcaatcacacccgcacactccaggcccaggatgtcggtaacacctgctggcggcggataatgcccagcgcgttgcagcaggtccgcgcggttcagcccagcggcagcgacgcggatacggacttcgccttcaccgcacgccggagccggtcgttcggcccactccagatgcccctcgataccttgcaatgccttcatgctgcctccatagtggttcatatctatgcccacccaactgatcgctcgctggccttctttgaccacctttaccatcgggcttgtgctttccaccgccggacggaaaccgaaccggcgcctactttagatggcctaatatgcgttattccctagccttacgtcgcccccaagccatgaaacgttcgctgacctgcaccgttctcgccgttcttttcggcctccatgcctccctggcgatggccaaagccgtcagcacgccggagaactgggactacctgcaacctgatcgtgaccaggtgatcgccagcctgaacgtcgtcgagctgctcaagcgtcatcactacaacaaaccaccgctgaacgatgcgcgctcggcgaagatcttcgacagctacattcagatgctcgacccgtcgcgcagctacttcctggcatccgacctcgaagagttcggcaagtggcgcaaccagttcgatgatttccttaaaggcggaaatctcgagccaggctttgccatctacaagcgccacctggagcggttgcagaatcgcctcaattacgcgctaggcctgctcgacaaaggcgtcggcagctttgatttcaccaaggatgaagagctgctgatcgatcgcgagaaagccgcatgggccaagaacatggccgagctcgacgacctttggcgtaagcgtgtcaaggacgaggttctgcgtttgaagctggccggcaaggagcccaaggccatcgaggagctgctgaccaagcgttacaagaaccagctggcgcgcctgaaccagacgcgcggcgaggacgtgttccagacctacatcaacgcgttcgcccagtcctacgatccgcatactcagtacctgtctccggataacgcggagaacttcgacatcaatatgagcctgtcgctggaaggcatcggtgcggtgctgcagagtgacaacgagcacgtcaagatcgtgcgcctggttccggccggcccagccgagaagagcaagcagctggcgccagcggacaagatcgtcggggttggtcaggccaacgacgaaatggtcgatgtgatcggctggcgcctggacgaggtggtcaagctcatccgcggcccgaaaggctcggtcgttcgcctggaagtcatcccggcgagcaatgcgccgaatgatcagagcagcaaggtggtcgccattacccgcgaagccgtgaagctcgaggaacaggccgcgaagaagtcggtgctgaaccttgagcatcagggccagaacttcaagcttggcgttatcgagatccctgcgttctacctggacttcaaggccctgcgtgccggtgaccagaactacaagagcaccactcgcgacgtgaagaaactgctctcggaactcgaagccgaaaaggtcgatggcgtggtcatcgacctgcgcaacaatggcggcggctcgctgcaagaggccaccgagcttactggcttgttcatcgatcaaggcccgaccgtattggtgcgcaacagcgatggtcgcgtggacgtgcttgccgacgaacaaaccggcgcctattacaaggggccgctggccgttctggtcaatcgcctctctgcatccgcatcggagatcttcgccggcgccatgcaggactatcaccgtgcgctgattctcggtggccagaccttcggcaagggcacggtacagaccatccagccccttaaccacggcgaactgaagcttaccctggccaagttctaccgtgtctccgggcagagcacacagcatcagggcgtgatcccggatatcacctaccctgccgatgtcgacaccaaggaaatcggtgagagtgcgctgccggaagcgctgccgtgggacagcatccgcgcggcaatcaacccggacatgaacccgttcaagccgttccttgccgagctaaaggcgcgccatgaggcacgcacaggcgagaacccggacttcgtcttcacccgtgatcgcttggcgcttgctcaggagctgatgcacgacaccacggtcagcctcaatgaagataaacgccgcgctcagcaggcggatatcgagaagcgccagctggcgttggagaacgcgctgcgcctggccaaaggcgagctgccattggccaagctggagaaggaagacgaaaccacgccgcataaggaaacggacaaacccaagcccgaagacgatgcgtacctttccgaaagtgggcgaatccttctggactacctcggtctcagctcggcaatggccaagcactgacagcagacagggcgttcagctttaccaaagcggcatcgctccagcgcgggaaaatctagggccacagtcgtggccctttctctttaacggcagagagccccatgacggtcaccaagccgttgagcacgctgagacacgtccgatcaatgcaggcgcgccgtagcgcgatatttacagccccagctgagcagccttcgccttgtaactgtcggccttctgggagtcagcagccagaccgtgacctccggcgcgatacaactgctcgagtcgaacggccgccagaggatgtcccgcttcggcggcctgggaccaccagcgagccgcctcgctgccatccggtccgtgcgacgcatcttcgctcaggctgacaacccccatctggtaggcagctttcacgtcgcccgccttggccgcaaggcgcaacaagcgaacaccctcctgcttggcgccatgacctcggccgcgaaaatacagaatatgcccgtagaagctttgcgcaccgacgtctcccagagccgccatacgcgcaaactgaccctccatccagctccagagtttcggttgctggacggcataacgggaagtcatcaacttgcgagcggtgaagtaaccgagcctcgcacgcagtttccacagcatcagtcttcctccggatattcgaactcgaacacccgcgccacttcccctgcatgccaggacgcagcagcagtaccgtcgatggctccggagaagcgccccaggctcgcggcacactcgaaaaagcccggacgtggtaaacggctagcgccctgactgatgaccagcgcgctacgcagcgggcgcccactacgggcatcaagtgcggcaagatgctccagcgctgcggtcagtgtctgcattgcgggagttggcaactgaaggcgctcgaccagcgcccggtaggtcaccagatgccgctggcgacgtgcagcatcaagctcaccgagtaaagcctgccagtgctggcggctgatggatactgacgtcaagcgtccccctcccaaccggtgatttccaatgcgcgggccaatgcgcggcgaatcgccgtatcgggctcgcgctcgcctgcctcgattaacgccaggtaagccgggctgatgcctaccgcacgcgccagtacttccatggtgagccccttggcgtcgcgcagcatcggcaattggctcagcgaaggacgcggctgtgcatccggggaagcaggagctgctgcaggcggtcgcgctccgacaacgttgaggagtgcctggtactcgtcccatggcagaacggcgtattccggcgagccgtcacgcatgatgacctgtacattcatccgaattacccttggcgtcttcgataagagggcggaatcttaacagcccacgccgctccttgaagctaccaagctgccgcacgcatagcgaatcgggaatggtgccgcaaatgtccgacgagcgccgaccaacggatggccaatgatgtgctctgtttagacttgtggcgagttatcactttggggctcatccagcgcgggcaacctgagcaacccagcttggcgctcggctgactgcgcctgcctccacgctttgaacgcttccagctctccggaccatttgcgcattacccagcccaacacggccagatcatcgacaaatccgaagcccggtatccagtcgggaatggcatcgagaggcgacaggaaatacagcaggccagccactacggctatcaacgcattcggactaatggcccgatactcaccgcgccaccacgccacgcaaagcgcgtgtagcaacgccagatcctctcgaaggcccttcagcaacccccgcttcgacgatgacttgcgtgccactgcaagcaacaatgcgggaatttttccgcgcttgataaggcgctgtgccagcggcatatatctcaggaaattccacggagctttcatcgactcaccttcagccagcgtcatccgtgacctcgaggacgttatccaccgaacctgtggataaccttgtgaacagattatggatgaccgccgcaaaagccctgcccatggggctgctcaacagatcggcgcttttttatccaacccagtaagacctttcgaatcaatcacttacgaaaaggcaaaacagacaccaagagtcaaggcagaacatctattttgctattccgaatgtgcataaccgaggattgtcaatggcttcacaagcactttgactggtggttgcacagggcgttcggcgttacggatggacaagaggccggtccttgcgaccggccctgcgctgcacgcttactgcacgctgagctggctacggatcttttccagggttgccgagccgatccctttcacttcaagcagttcgtctaccgaactgaacggcccatgctcttcgcggtaatcgacgatcgccttggctttggtagcaccgatgcctttgagctcacgggtaagtgtggcggcatcagcggtattgaggttcaccgacgcctgggtgacggcggcaaccggtgcaggtgcgggctgagattgagtggcggcatgagcgccaaaggaaacactggcaagcacggcaaacgccgcagcggcaagaaaagccttgttcatggagatgtccttatccgagaaatgtctatgcgggacttcctgctccgcgtcagccaatctagccgcctgtttgccgatgtcaaaaacgaggctgcatttttgccaacctcgtcaaactcctcagcgcatggcgttgaacaggttcagaccactgattttgacgtagctctgctgcgctgcctcgagaatgatggtctggaatgacaatctggaaagggcttcggcgtaatcgagttcgcgcagctcggcctgaacagacttgttcaccaatgtcacatcctcgttatcggtctgcgtagtctcgattacgttgagccgtgcgccgatgttaccgcgcgccgcgtcgacgctgatcatgccgtgatcgaggttggtaagcgctactgctacagcatcgcgtacgccggcattgccggaggatggatcctccaatgccttacgcaggttggaaatcgtctctaggatgccctgcttctgtacagtggggttcagctgaacctccactgtctcaccgccgacgggaatgccatcgaactggatgaccacgccgcggaaaaccagcttttcggtagttttatcctgctgatcaaccacgcctgaagcgagaacgagactggggtcgattggcggattggcaaaatcaggcgcagctgccaaatcatagacgacgtactcagtatcggacgtaaaccgcacaccgaccccagcagccggaaatggcggattgccgctaatggcaacctcatcctgcaccaagggcgccgacaccctaagcgtcgagcccggctgtccagtggtatccagactgctcacgtaacgtccagcattagtcacgttttcgaatatcgacttaccgctatcgctgatggctatattcaacgaactagcaatctgcagtttccgttgcccctcgtcaccttggtagctatagctgccagcgccatcgcgcacaaacggctgcgtctttccctgaaaacccgaaaacagatactcgccacgggcgttacgggtgttcatcagtgaaagcagttcgtcctcgcgctcagtaagctccgctgctatcgacttgcgatcgtcagcgctcaaacctccattacccgcctgcaccgccagctctcgcactcgctgcaaaacggtattcaccgaattgagggtgacttcctcctgcgtaaggctgttcttcgcggcggtcagattggagttgtactggctcaatacgttctgttgctgctccagctgcagcaggcgcaccgaagcgaccggatcgtctgccggcgtaagaatgcggttgcccgtactgatctgctcctgcgtacgagtcgcgttggcgtagttgcgctgcaacccggcgacgccgttattgaacgcttgcacggtagaaatgcgcataggacgggcctgttacctaaaagagctgatcaatgtatcgaacagagagcgggcaacttgaatgatttgggccgaggcgttgtagtactgctcgaacttgatcaggtttgccgcttcctcgtccaggtttaccgcagagagcgaatcacggttgtcggtcgcctgcttgagaattgccccagtcgcttcgctgtccatccgggcctgcgccgtcagcgtaccgacacgctcgaccagctcgccataaccatcggtgaagctaaagccggaaccagcgacaccaggggtcacgcctacggtctgcttggtctgcaggtccactagtttcaaggcattgcggttgtccgagacgccgttctggttgaagttgaacgagaaggtatcgcccgtcacgggcctgccgcttacggtgaactcgaaactgtattgctgcacattgggcgccgtacccgtagtaagagtcaggtttagcgtattggtctgtccggcggtgatgttcgaaggcgacagcgtgagccctgccggcgctggtgtcggaagtgccagcccgttgccgtcgtagctcagagtcagcccttcaaacgcggccgatagcgcagccgcatcgatgggcgatggaccagatagcagattcggctggccgatcactcctgtcccgctgttctgcaaggtgctctgggcacgcaccggtgctgcaaacgccagctggtcggcctgatccagcgtcgccttgatatcagaagcgccacgccgggtcggctgcaggctgaacttgtcgccaggcgccggcggcggattgcccagcacgatctgaaagccctggtcgcggccattcttgtcagtgatcgacaacgtaccgaccggattctccgtagccgtcatcagctggttatcgctcagccgccgtatcttgtagctgctaccgtcatactccatcaggtagtcgctggtgctgagctgactggtattggtgatgttcaggaccggttgtgcattgctgttgccagcaaacgcattgacacgcaacctggccagcgccgggtcgttgtagttaccaaacagcgccgaaccgacctgccccttcagatccagcccctgccccagttgcgtattgacctggtcgctcacggcgagcgccaggcggcccagggagttcatggtggaatccagcacttcctcgcgatagcgaatcagcccgcccagctcgccgccggtgatctgcgacgtgatcccctgccgcgagccgccgctgatgaactgcacttcatgccggttggggtcgccctgccctggcacgacttcgagacgcgccaccgtgctgccgacaaccagcggctggccgctgccgatgaagatgttgaagctcttgtcatcttgcggaacgacagtcacgccgatgtagcccgacaactggcgaaccgcctcgtcgcgagcgtcgagcagatcgttcggctgcttgccattggccgcagcgatggcgatcgcctcgttcaggctgccgatgctgcctgccagccggttcacctgatcggtgacagcggacatctgcttgttggtgaaattgttctgctcggagagccggtcatagaccgtattgaagcgccgcgccagcccctcggcctcggccagaaccaattggcgtgctgggatattcgccgggtcctcggcggcagtctgcaaggccgagaagaacttctgcagcgagggcgtgatgccggtggtagtgccggccagcaacgaatcgagctgattgatctggctcttgtaggcctccacatcagcactcagcgaagtactactacgcagctggctggtgaggaattcgctatagctgcggcgaacttccaccagcgtggtccccgagccgatatagccggcaccactgaactgtggtgagcgggtggcctgggtcgcatcctggcggctatagccaggggtattgacgttggtaatgttgtggccggtgatcgacaactgggtcttgctggcagccaggccggaaaggccaatgctcaataggtcagccatggtttagcctctggtccgcatcgcgggcaccgaattcgcgtcggcaacggtctgataggtctgcatcttgcgcgcgatctggctgatcttgcgggcgtactgcggatcggtggcatagccggctttctgtagttccttgacgaaacgctccgaatcgccggtgttgctcgcaacctggattgcggtccggtagcgatcattgttctccagcaggctgacgaaatcgtcgaagctctgctcgaatgaatcgtaggcgcgaaagcccgccttctcgcgggtggccttgccgttgacgtattcggtcgtcgtgacggtcgcggacgcacctttccagccggtcgccttgatgccgaacaggttgtggctgttgctgccgtccttctgacgaatcatggattttccccagccggtttccagcgcggcttgtgcgaccagaaaacgtggctcgatcccgagacgctcggctgccttctctgccattggcagcatggtggcgatgaactcctgcgaggagctgaaacgcgtcttgctgggcgcgttcggagcactcttctccacgccgtttacggtcagcggcttgtccacaggcggcacgaacgcggtggccggcttccagtcgacgttgaccaatggctgcaccgcatcgccgcccggcggaaccgctgtggctgacacgttggcaacctggcgatcgctaagcttcccaggcaaggcgagcctgcgctggttgagcagccgtgaatcatctcgagcagattcgacgccagctgccggcttgctcggccaggctgcgccctcggtctgcgcaacctgggcgaatggattgttgcgcgtcaccgtttcggtctgtttgctaagttggcggaccagcacatccgccaggccgatgccgccaccttccttggacagactcaccgatagctgctggtcgtacatgtcctgatactgcttgctggcctggctattcagaggattgtccttggccaggacctcggtagccgcacgcatcgacttgagcatctcgttgaggaacaacgactcgaattcctgcgcaaccttgcgcacgttctcctcgccatcgcggtctttgccgaccttgagctggctgagacgattgaggtcggtatagctgccgctatcgagaccgcgtgctccgctaccgagacgattttccatatcgctacccttagatcacgatcaggtcggcttgcagcgcgccggcctgcttcaacgcttcgagaatggccatcaggtcgctgggcgcagcgcccacctgattcaccgcccggacgatttcatccagcgtggtgcccgggccgaacttgaacatcggcttggcttcctgctcggctttgaccttcgagttgggcacgaccactgtctgcccgtccgagaagggttccggctggctgacctgcggctcctcggtaatggtcacggtcagactgccatgggtgacggcggcaggctgaacccgcacgttctggccgatcacgatggtgccggtacgcgagttgatgatgaccttggccacggcctggccgacttcgacttcgagattttccaggatcgacaggtaatcaacgcgctggctcgggtcgagcggcgcggtcacactgatcgaccctccgtccaacgcctgcgccacgccagggccgagcaggtcattgatctggtcgacgatattcttggccgtagtgaagtccggacgattgaggtttagggtcagtgtgttgccctgattgaaaccactcggaaccgggcgctcgacggtcgcgccaccgggaatgcggccggccgacggagaattgacagtaatccgcgagccatccgcgccacctgcatcgaaaccgcccaccaccagattgccttgggcgatcgcatagacgttgccgtcgatacccttcagcggggccatcaacaggctaccgccgcgcagactcttggcgttgccgatggacgagacagtgatatcgatggtctgaccgggcttggcgaacggcggcagttcggcatggatcgacactgccgcgacgttcttcagctggatattgccaccggcgggcaccttgatgccaaactgggccagcatgttgttgaaggtctgcacggtgaacggcgtctgggtggtctggtcaccgctaccgttcaagcctacgaccaggccataaccgatcagctggttgctccgtacaccatggatggtcgcgacgtccttcagacgctcggcctgtgcgccagcgcagagcgtgagcatgcccgcgagcagaagcagttttttccacatgacatcagctccggtcagaagggccacatcgggctcatgaagaatcggtcgagccagcccggctggcttgcatcggcaaacgcgccggtgcccgaataagtgatacgtgcatcggcgatacgggtggacggaacggtgttgtcggtggagatatcgtccgcgcgaaccagacctgcgatacgcaccagttcgtcacctgtattgagcgtcatccacttctcgccgcgcacggcgaggatgccgttaggcagcacttcggaaacggtgacagtaatggaaccggacaggctgttgctctgccctgcctggccagaaccggaggtgtcgcgcgacgcctcgtactcggcacccaggttcatcgagttgcccgtcagagggttggccatggataccgcaccgccaaacagcgagccgagacctatgttcgcgctgctgtccttcgacagtttcgacgtcgcgttcttgctggcctgggtccgctcgttgagggtgatggtgatgatgtcaccaacccgatgagccttgcggtcgtcgtagaggttggtctcgaagcctgcctggtagatcgcgccattgttctgcgcagccggcaacggcgtgcgtggcagcaccggcgcgtagtacgggtcgttcggtttcggcgcgggagcaacacatccgaccagcgccagggcagaagacattgacacaacaatcaacaaacggctcataaacacctcaagccatgacaggccatcgaaactactgcgagcagcacgaggcgtgcctgcccgtatacaacggcgcatacgcgatcagagctgctgcgtgacgaacgacagcatctggtcggcggtggaaatgaccttggaattcatctcgtaggcgcgctgggtggtgatcatgttcacaagttcctcgacgacgctgacgttggagttttccagggtgttctgcagcaccgtacccaggccgttgagccccggcgtgctgacctgaggtgcgccacttgcagcggtctcgaggaacaggttgctgcccatggcctgaaggcctgccgggttgatgaagtcggccgtctgcaaattgccgatgatctgcggctgcgggttgcccacggtggtgaccgaaacggtgccgtcttcgcccacggtgaatgtctgggtttccggcggaaccacgatggccggctccaaggcgtaaccgttagaagtcaccaactggccatcggagctcaggtgaaagctaccgtcgcgggtgtatgacaccgtaccgtccggcagtagcacctggaagaaaccacggccattgatcgccatgtccaacggctgctcggtggtctgcaagctaccggcggtgaagatcttctgggttccggtcacacgcacacccgtacccagctgcagaccggacggcagttcactgtcctggctggattgtccgccaggctgccggcgaatctggtaaagcaaatcctgaaattcggcacggtcacgcttgaagccggtcgtggaaacgttggccaggttgttggaaatggtcgtcaggttcatgtcctgggcggacagacccgtcttgctgacccaaagtgctggaagcatgagctttctcctcgtgcgccgcgggcgccacgctattagctgagttgcagtacgcgcgccatggcagccgcatcatcttcggcggtgcgcatcatctttacgtgcagttcgaactggcgggacagcgccaggatggaagtcatttcggagaccgcattgacgttgctcgcctcgagaaaccccgacacgactcgtacgtttgcgtctggttcgacgggctggccatctttcaggcgaatcaggccatcggtacccttttccagctgcttcggatcggggttcaccagcttgatccggtcaaccgtaaccacgatgttggggttttcacccagcgcccggatgctgatggtaccgtcgtggccgacatcgactttctcttctggcggaatggcgatcggcccaccgttacccattacaggcatgccatcggcggtgcgcaacatgcccagcacgtcaatattcaggctgccggtgcgcacgtaggcttcgcttccgtctggcgcctgcacggcgatccagccctcaccttcaatggcgatatccagatcgcgacccgtttcctgcagtgtgccggaggtgaagtcagtggcgggacgctcggacatggcatacacccgggccggatgactgtcgccaaagacctgcatggagcgggcctgttcgaaatcccggcgaaaacccgtagtggatatgttcgccagattgttggcatgggcctgttgtgcccgcgcattctggctggcaccggtcatggccacgtaaagcatcttgtccatcgacatctccgagacgcgagtttgacacttgctaatctgttggagatgaaaaatgcaaggcccgtgccatagccgatccgatagacaacagattgatttataagagttttataaagacaaagaaggcccgaatgggccttctttcagaggagtggcggaatactgccgccagcggcaatcacccctgccgcgccattaccgcagatttatgatggtctgggtgatcgcactctcggtctcgatggtcttggcgttggcctggtagttacgctgagcgacgatcaggttgaccagctgatcagacagttcgacgttggagtcttccagcgctcccgcctgcagcgcaccgagcgtgccggagcttggcgtacccactaccggttcgcctgattcgaacgactgcacccactgcgtcttgcccaccggagtcaggccttggacgttggcgaagttggccagaatgatctgcccctgaaccttggattggccgttggtgtaacgcgcgaagatcacgccggtatcgtcgatctccaggccggccagctcaccagtggtatagccatcctgcgcaacgctgttcacggcgaaagcactggcgtactgcgaagacttcgagaaatcgagcacgatgccacccggattcgctagcgcaccgtttggcgaccagctagcaggcgtagcaccgttagagatagccgggatccaaccgccagtaggcggattgcccgtagcggagttcagcgtaactttccgatcaggcgaaacgctgaaaagtccagagccaccattatcgatagctgtcagcgcaccggaagcatcgaaggacagccccatgacataaggctgaggcggctcttgtgctggattggccggattgcgaccgtcgatgagcaccttcatgtcccaagtattggcactggtcttgacgaagtactgcgtcatgacgtgcgcattgccctgggagtcgtagatattcagcgaagtggagctattgtaggtcgtggggtcggcagggttaaacgtgccgttggcggcagtaagagctgctgcctgattgacaggcaacgccctcgcagcgtttccagcggcctgcgcattggaaatatttgttgcgttgacgagcgcagcagcgcgtgcagcctcagcaagcactgggtcgctgctcaccgcaaattccgcgtcatatgcagtctgcccggcggtggtgagcgaggtgttataagccgcgtcatatgctggctgcaatgaggcgtcataggcagactgccaagtaactggaggcttctgcgtcgagttcagattgaacgccgtatcgatcttgctggtcgctttcggtgcctgattggtagtttgaatttgcagatcaccaaccacaccattctgcagattgccattcccgtccactgggaacccttgcagcttatagccgaagttgtcgaccaggaaaccgctgcgatccgtaccgaaataaccggcacgggtataacttaccgcaccgttgttgctgacctggaaaaagccgttgccgttgatggccaggtccagcgcgttctgggtgtagttgatgttgccctggttgaactgctgggagatgttggacatcaacacgccgctaccctgggggttcttgcccgtgccgagcacagacgccgcgtagacgtcggaaaactccgcgcgcgactgcttgaagcccacggtgccggcgttggcgatgttgttaccggtgacgttgagatccttgctcgcggcacgcaggccgctaagaccgatattgaaggacatgaatcgctcctttgccgagagtgcggcggttattgtccgatgatctggacctgggagaggccgatgctgccgataccggcaaggttgagcatcagctccccgccgttctgcccaagcgtgacgctgtcgacgttcgccggcagcaaggtgtaaagccctttggtttcgccctgataggtagcctgcgcctcgaagcgataggtaccgggcggcaagacattgccgctggaatccttgccgtcccacatgaaggaaatgttgccagcttgctgctggcccatgttcacacgcccgaccgaagcacccgtactgtcgtaaatattgacgaatacgttgctgctggaagtcggcaataccaggcttgccttgaaagtttcgctggtatcgaccacagccttgtcggtcggcacgatgaccttgcgccctaccagcgacgaggcctgcagcgcctgggacgactggtagccggacaggatcgtctgcatgctcgagttgagcttctcgacgccttccacggtgctgaactgcgccagctgaccgatgaactcgccgttttcctgcggctccaaggggttctggttgttcagctgggccaccagcagctcgagaaactcgttcttgccgaggtcgttaccctttgcttcgcgcttttcgccgaactggtactgatccagtatcgagccggttccgccgacgccgttcgtagtgctcataagtgcgctctcgtaactatcactgacccagcgtcagcactttctgcaacatggtcttggccgtgttcatcagctcggcgttggtctggaaggcgcgactggccgaaatcatgtcggccatctcttccaccacgttgacgttcgggtaatagacgtaaccggcctcgtcggcagccggatgattgggctcgtagcgggcctgcagctcgctctggtcctcgactacacccagcacctgaacaccaaccccggcctggtcctgaccggcgaacagtgactggtcgggctggccgttggcctgctggaagaccgtggcgaataccggatggcgcgcccggtaggtctgatcgacgcttgacgatacagtctcggcgttggcgatgttgctggaaatggtgttcaggcgggtgctttgggcactcatgccgctgccggcaatattgaatacgctgctaagggacatgggctactccttcattcgccgcgcagggcgctcataagccccctgaacttgctgttgagcagggtaaagctcgcctggaagtccacggcgttcttcgcatagttggattgttcgatctgcagatcgacggtgttctgatcaagcgaggggtgtgcgggcgttcgaaagcgcagggatgcatcagcgatttccagcccttcggctgcgatatggcggtcgctggtccgcgtcacgccgaatccaccctggctgcgcgccgactgctccgccagcacactgccgaaatccagatcccgtgccttgtagttaggcgtatcggcattggcgatgttgttggccagcacctcggcgcgctgcgagcgaaagccaagcgccttttcatggatacccaatgccttgtcgaaactgatgctcatgatctggacctctgccggatacaagtctgcttgcgcaaactccagcaaagcccatgccattacatgcaacctcttgatttacaaggcttggcgtcgcgacaacgaacgtcagggtgtcaaaagcggcaaggctttaccgcttggttgccacaaccgccaccttgcatgacggttttctgccgcgaggaacagcagtcatctcgccttgtagatgatgcccgggctgcattgaaccatctggtacagctcgggaagcccattaagggcttccgaagcccccagaaagagatatccgccagggcgcagcgttgcatgaatacgcttgagaatgtctttcttcacatctgcggagaaatagatcagcacattccggcagaacacaatgtcgaatttgcccagcgcggcgtagctgtccagaagattctggaccctgaactcaacccgcgagcgaatcgccggctttaccgcccaacgccccggcgccttaacgtcaaaatagcgttgcagacggtcgctggacagaccacgcgcaatagccagactgtcgtattcagccgctttgcacgcggcgagcatggtcccggaaagctccgtggcaacgatctgcaccccggtcttcgcctggctggggttgctgcgctcgtactcatcgatcgccatggatagcgaatacggctcctgccccgaagagcaggctgccgaccagattcgcagacgctggccggagccggtcttgagcatttcaggcagaactcggcttttgagtacctcgaacgggtacgtatcgcgaaaccagagggtttcgttggtcgtcatcgcatcgacgaccagttcccgcaaccctccgcgcggctgtgcctggattttccgcaccaagtcgccgagcgtcttgatgccctgctgctccatcagcttgttcagccggctggacaccaaatactgcttgttgctgcccagcagaatgccgcacgttttctcaagaaatacccggaactgctcgaaatccagatcgactgacaccaataaagcctcaccatcatgagaggagctagcctcagtttgcatccgcctgcctgatccgctcggccacgcgggcagcgagatcgtcaggctggaacttggcgaggaaatcatccgcgcccgcccgcttaaccatgttctggttgaacacaccggaaagggaagtatgcaggagtatatgcataccctgcatgcgcggatcgtgtcgcacctcggtagtcagggtatagccatccatttccggcatttcaatatcggaaatcatcatcaggaattcttctgccggcttcttgccttcgtccgccatccgcttgagatagttcagcgcttctcgcccgtcgttcaatttgatcacctcgatgccgatattttccagacagcgagtgatctgcttgcgcgctaccgatgagtcgtcgacgatcagtacgcggcaggagagcgccttggcccgggtgtccgcatcaaccacctcaggggagacttcctccgaggtaggcgccacttccgccagcactttttccacgtcgatgatctcgaccagcttgttgtcgatgtgggtgaccgccgtcagataatgatcgcgccccgcgcctcttggcggtggcagtatcgcctcccagttgaggttgacgatccgttcgactgagctcaccagaaaaccaagtgttcgattgttgtattccgtgatgactgcaaaggagttctgcaggtccatcagcgccgacttgcctgttgccagcgagagatcgaggatcggcagcgtagtgccgcgaatgctcgcgaccccgcgcaccacccgtccacatttcggcatgatggtcagacgcgggcactgcaaaacttcgcgcaccttgaacacgttgatcccataaagctgctcgccctcgagacgaaacagcaacaactccagacggttctgccccaccaattgggtacgctggttaaccgaatccagtacaccggccatgccagtattcctctctgcttgcagataattggggccagacgaatattagacgcggcacgccccttgctttggttgggatatgaacgtccatatgaccattttccggcgcagtcgccagatgctgtgcggctacttgctactcacagcgctgtgcgcgatgagtcaattcgcgcacgcatcaaccatgtcacaccctgatcagcttatcgacgtgactgagcagtttcttgagcgcgcagtggtggactatttaagtcgcagcagcatcgacgcgcgccacgaaatcgcggtcagccgcctggaccccagactacgcctgaatcaatgcgaccagccgcttgcagcgagcttcgccaactctgcgccccccataggacgagtcacgatacgggtaagctgcgaagggaatagcccctggtcagtgttcgtcccggcgcaggtccgactctaccgcgaggtggtcgtcgccaatcgatcattactgcgtgacacggtattagccgacgcggacgtgagtctcgccgagcgcgacgtgtcgaacctcagccagggctatctgacgcgcctggatgaagtgctgggcaacaagctcacccgccccgtacagccggatcaggtgatcgcacccaatctgatggaactggcgaaggtagtacgaaagggcgatcaggtcgtcattacagccaggagcggatccatcagcgtccgaatgcctggcgaggccatgacggatggcgtaccgggcaagcagatccccgttaaaaaccagcgctctggtcgaatcatcaaagcccgcgtcactggccccggccaggttgaagtcgcaatgtagctgcaacgtgcctgacgcactttttcggtgtgccatccggaaaaaaaagctaaagtttgctccattgttgccgaacacatggcaagcgtcctgattccttcgaggtttgcatcatggtcatcgacttcaatcgaccgaacagcccattgaacgcccccagcgggcgcagcagtgtgcaaggtaacgagcgtaccaccggcaccccagcagagcctgctggcaacacgccaaaaaccggcaacgcgagtgccagcattggtgacaccgtacaactgagccctgaagcccagcgcctgcaacaggcgaccgacaagctcaacgagcaacctgcggtcgatcaggagcgggtttccaagcttaagcaggccattgctgacggttcctatcaggtcgacagcaagcgtgttgcagccaagctattggctttcgaaacgcagcgctgagcctgtcacactcgcgaagatgcccagagcctgaaatgaacgaaaccaccctgcttgagcagctgaccgatgatatcggcatagcccgcgaactccttgagctgatcgaccaggaattcaaggcgctgagcgaccgcaacctggccgagctggaagtgctgctcaccaagaagcagccgttgcttgccctgctcggccagcacggagcccaacgcagccagtggctgatagatcagcagctgagcgctgatcgtgcggggctggaaaacgccgccagcagatctcgagaaggcaccagcattctggagaaagcccagctgctcgaagctgagctcgagaactgtcgcagcgccaacgagcgcaacggccgattgatccgcgcgaatcagggggcacttggaagcatgctaggcatcctccaaggcaaggacgacacgcccagcctgtatgacaatcgcggcggagcctccagaaacaagcagcagcggcccctgagccaagcctgaatcaacgccaccaggacgtaacgtgatggttatgaatatgcgccagggatcctcggaccgtgtctagcctatttctggatgaagagggtccgcagccgcctaaacttcttacggcccccctggagatatacgccaacctgcggcctctcatcgataacaacacccccctcaccctccggtttcacgagcgaagccagcgctaccagaccttccttgtggaaatgaaccgcgagaccggctggatcgcgctcgacgaattgattccgaacgacggcgagcgcttcttgctgcagggcgaaacctttcatatcgaaggcttctatgagggggcacgggtttcctggacaaatgatgagaaggcgcacttaggcgaaatagatggcgctcgctgttactggatacccaccccagcggaactgacctaccatcagcgccgcaacgcctatcgcgcgcagctgaaagaggcagccgttaccgcccaacttggtggcgccgctttacgcaaagcactggaaggcaggctgctcgacatctcagctactggctgcaagctcagcatcaaaggcaatcaacaagccagcctccaaaccggacaggtgtacgagctgtcagccagattatcgatagggaccatccagacagcagtcgagctgcgacatctggtaattgatgagaagctcgatgcttccctatgcggactgcgctttcaccgcctcagcggcctcacacagcgccagatcgagcgactggtgtatcaactgcagcgcgacgcacgtcgcgagacggccgaaagtcctttcggctaacacatcagcagatcctaccgcgcgagcgcggcgcccctgccctgccctgccctgccctgcccagactaaagcaattcgcctgagccgacgccacgaacgaggagaatatggcgtcccagagaggggtcgaacctccaaccttccccttaggagggggatgctctatccgattgagctactgggacgtaactgcgcgccgaatgttagcgagccgagcaccatttgtcatgccaaaggccgctaattgctgagcatttgatagcacgctcaaatgacccacaccagctcagcgacgccatgcttgcatattgcacgacgcgacgacgcctgccgtgcaaagcgcacgtcaaacgcatccagcaaccaatatatgccattgattttaaacgattttttctataaccattcttggcatatctgctgcaaaggagaagcaacctaaacgtgacgcgaaggatgacgcctcatgaaaaagccggtttatctcctcaccgcaggcttcgcactcgctgccttaaccgtcttgcaattgccagctgcagaaaccgcatcgccacggctcgagctgaatgcgcacccgaccctgcagcgcaccagtgcaaatgaaggggttcggattattaccctcagcggcagcgaaaccagcgcactctcgcaacctcaacgctgggttttttaacgccccccccgaaacgcaatcgttccaaaaaggagagaggttcgatgtccaaatacgcactatcctgcttagttctgactgccggatgcgtgtacggtgccttcctggcccccgagcttacgaccagcctcgtccaggcaagccgggccggaataggtgtctttggcacgctattcattgtggccatgcttatcgggcgcaggatcaaattcgatccagtgcttcgctaggtgacggaaggtccgcatccgcacagggcactgcatcacaatagaggcacattgatagcacaacgactttactaattactcatacgacgtacaattggcgccatcaagccgtctagagatttttcggtgaagagacggaacagcaagtactgttggttgtcagaccggtgactaccccggcaatacgccagcacgcccacctgactaaccggttaattatgcgccctatgaaacaggcagtttattccagccgcacggctgacaagtttgtcgttcgccttcccgatggcatgcgcgagcgcatcgctgaagtcgcacgcaatcaccatcgaagcatgaactcagaaatcattgcgaggttggaacagagtcttttgcaggaaggtgcactcgacgatgatctcagcatgcgcctggacagccctgaactttctctgcatgagcgagagcttttgcagcgcttcagacagctagcgcaccgtcagcagaacgcgctgatcgccttgattgcgcaagataccgagctgaacaaagaagacgattg

SEQ ID NO: 83 - DNA, 18723 bp, Unknown
  From metagenomic library of CO182
tcaggccttggtcaacagcccgtgggaatcatctgcataccgcaagcgcagccgcgcttccaagtctcggagactctggcgcatttgcgtcgtcgtgggctgcgtgtaggtctgactcgatgtgatcgacgcatggtgcatggcgttcttgatcaacagcgggtcggcgccatcgcgagccagtcgctgcccataggcatgacggtggccgtgcggggttgtgccctcgatcttctcgtacactaacccgatcctctcaatacccaacttgtgagccttgcggaacatccggtgcgagtaaggcaggccatcgcggttggtaaaggcatagggatgaccttcgctggccttcggctttaaccgctgtttcaggtgatagtcacgccacaactcggcaaaaatctgcccggcttcatgggggaagaaaaagacctcgaaacagcgtcggtgcgggtcggtaatcaggccgttcttccacccgaggaacagcgggtcagtcgctttgaccagtcggttacggggttgcaggccgtattggctttgaaggtaagcagcgcggttggctttaccgccaggtgccagcccgtattcagggtgataaatacggacgatgaccgccccggcctctaagctaacgtcatcactccaaagtgagagcgcttcggacagcctcaatccgccgtagtgcatgaggtaggtaatcaggacatttcgaaggtctgtaggcccgcgtgaatctcgtgacctcctgcggaaaccctcgcataccagcagctcgaagtgttcctctggaaatgccttggtgggcgtttgtcgttcaacaggcactgtccttgagcgcacggctctggactgcttcgtctgcgacgtggaacgccagaggtgggaaagaaaggcgttatccctgcggtgcgaataggccgcccaattcagccgttcctcgtgccgagtcgcctgccgccaggggttgagttgcagcttagcgccctcgttgacggcagccagccaatcggtgaatcgggtgacatggccgatcaacttaccggcatcgtccggttgccttggttgccaccacaggcctgaagggtcgctgctattggacaccgtgccggtgtaaagcgtgtctgagaacgctgtgaacagcgccctcggattgtcatagaagccctggttggcctccatgtattccaacagcaactgcaacgcgaaagtcgcagactcctgccaggaacgactcttgatccggttcagatacatgtatcgagcgaactgatccaagacgccatgctcggtgacgataaccggcagggtaatctgaattcctgtcgaatcagccacaaaggctctgaactcacgatgagacgattcgaggacagttggcatgagcggccctacgatatttcttagtttttatgtactcgtttgggataaatctagctcttaaactcgtaccaacaagccctcaccaaataaatatcaggggatatctatgctggatgtgggcttttgagttgaggtttaggaccgcgtatcggggtaactaatcgcagaaggtgcagctgttccaggagcaaccattggtcaccggcaggatcagcgaatgcgcttcgctgggcggccgaaataccggctctatgtagcggatgggaaactcgctcgcgttcatggttaccacgtccgttcgatcggcctgcgtttcagtcacgcttgcgcttgttgcccatgcgcacgccgatgtccatcaggaactggaagaagccgtcctgatcttccagcacgttgctccagaacggcgagtggtacagcgcgacggcgccgtgcaccagcgcccaggcggcgcaatagtgaaagtacggtggcacgtcttcgagcttgccttcagcgatgcggcctttgatcagctgggtcaggtgctcgaagttggaggcacgaatgctgtgcagctgctcgaccatctccggcacctgattgcccttgaccactttttcttcgaggcggtcgaacaggcgatagcgctgcggatcgcgcatgcggaattcgaagtacgcgcgcgaaagcgcttccttgtcgtggtccagatcaggcgagtgaaggatctggttcaggtcgcgctcgtagtcgagcatcagccgcaggtagatctcggccttggacttgaagtgcttgtagatggtgcctttgccgataccgaccgcatcggcaatcatctcgacggtaacgctatcctctccttgctcgagaaaaagctgcaacgctgtatcgaggatttcctgttcgcggcggcgaaattcgcggaccttacgaggttcattctgcataggaaggctgcttgaaggttgagtcgaggcagccattatgcctaaccggtcatgaaatgcacgggacatccaaaaatgattcaaaaaaatgacgaatttccgcaaatagtcggtttgcgatatctgaaccatgccgccgtcgcaccctggccgctgcgagcagcgcgcgccgtcagcgcttttgccgaacagaacgcgaccctcggtgcgcgcgactatccaacttggctgacagtagaacgaagcctgcgtcagcgcctgacacgattgctgaatgccccaagcagcgccgacgtggcgctggtgaaaaacacctccgaagcactgtcgttcgttgcattcgggctggattggaaaagcggtgaccagatcgtcatcagcgatgaggaatttccgtccaaccgcgtcgtctgggaagcgctgcagcgttacggtgtcgaggtggttcaggtcaacctcaagggcaccgaccctgaaggcgatctgctggcggcctgcggcccacgggtacgcctgatggcgatcagcgccgttcaatacgccagcggcatgcgcctggatctggtccgcctgggtgaaggctgcgagcaccgcggcgtgctcttgtgtatcgatgcgatccagcagctgggcgccctgcccttcgatgtgcagcagaaccgctgcgcctttgccatggctgacggccataaatggatgctcggcccggaagggctcggcgttttctattgccgcagcgacctacgcgaacggctgaagctgcacgaatacggctggcatatgctggaacacgccggcgactacgaccgcaccgactgggagcccgcacgcagcgccagacgcttcgagtgcggcagccccaacctgttgggggcaatggcactcgaagccagtctttcgctgctcgaggaagtgggcatggagcaagtcgccaagttgctggacgagcgaatcgaatggcttgcccagggactccacggcctgaacggaatcgacatcctgtcaccgcgccagacggaacgccgctcaggcattatcacgttccggctcgctggctggacgaatgccgagctgttcgaacgcctcaaggcggagcaagtcgtgtgtgcgttacgcggcggcggcatccgcctctctccgcatttctacacaccagcgcgggtaatcgacgaaacgctcgccctgttacgaaagctggctgcgcactgaccgcgatcaaccagcaagacatgtattccaaatgcgtttaaaaactgcacaaatccgcctgcagagcgcagatgcagcgctaatacttgagtaactggccgggcaatccccccactgcccagccagatgaggtcgctaggattgcgatttcatactcctaatggtcttggcccggcttctctggaatccgggttttttttgccgtggcttaccgtaaacgctatagcgccctcgccagtaaacgagcccgcagccgatagcacagccagagaaagccaacccagacgggaatggcgaataccgacatgcgaatccctggcaaccacagcatgatgatcaatatgccggcaacgaaggccaggcacaggtagttgctcagtggaaaccagaacgccttgaagcttggttcgaccccttgctgctgcatggcacgtcgaaacttgagatgcgcaagactgatcatcgcccagttgatcaccaacgcagccaccgcgagagacatgagtaactcgagcgcgccctgcggaaacaggtagttcaccgccacgcaaagcagcgtcaccaacgcggatacccctaccgcgaggaccggcacgccgcgagagtttattttcatgaggctgcgcggcgcatcgccttgttcggccaggccgtacagcatccggctgttgcaatacacaccgctgttgtagaccgatagcgccgcggtgagcacgacgaaattcagcaggtgcgcagcagtgtcgctgccgatcagcgaaaagatctgcacgaacgggctgccgctgtaggggtcgcccgcggcacccagcgtccgcagcaacgcatcccagggataaagtgccagcagaacggtcagcgcacctatatagaaaatcaggatgcgatagacgacctgattgattgccttgggaatcacggttttcggctcagccgcttccgccgcggtgatacccaccagctccagcccaccaaaggaaaacatgatgatcgccaaagccagcagcatcccgctgaagccgttaggaaaaaacccaccgtggctccacagattgctgatgctcgcctgctcgccgcccttaccgctgaccagcaggaaaagcccgagcaggatcatgccgacgatcgcggcgaccttgacgatggcaaaccagaactcggtttcgccgaaggccttgacgttactgaggttgatcaagttgatcagcacgaagaacgctgcggctgtagcccaggtcggaacctcgggccaccagaactgtacgtacttgccgaccgccgtgagctcggccatacctaccaggacatagagcacccaatagttccagccggaaagaaaccctgcatagccaccgccatacttgtgtgcgaaatggctgaaggagcctgcaaccggctcctcgacgatcatttcgccgagctgacgcatgatcagaaaagctatgaagccaccaatcgcgtagcccaggatcattgacgggccggcacttctcagaaccccggccgagcccaggaatagcccagtgccaatcgccccgcccagagcgatcaattggatgtggcgattcttcagaccgcgctggagcgatccggtgtgcagcgtttcagcggtcatacaccaaccttgtggatattcaggcaagaaaagcgccgccgcccatgcaggcaagaaacaaggcagcgcatcaggcttgctcggcaagcatcaactttccgcggggctacgtcagccagtcactctggccagcgggaacaacgtcttgaagttggcagtggtctgctcagccagcacttcgaacgggacaccacgcagctgcgcgaggaactcggcaacctcacgcacgtactgcggcagattggctttgccacggtggggaatcggcgccagataaggcgcatcggtttcgaccagcaagcgatctgccgggaccttgcgggctacatcgcgcagcgcatcggcgttgcggaacgtaacgatcccggacagggaaatatagaaaccgagatcaagtgccgccttggccatgtcccagtcctcggtgaaacaatgcagcacaccagcttgcggcagcgccgcttcacgtagcagatccagcgtatcggcgcgggctgcccgggtgtgcacaatcaccggcttacctgtcagcctggcggcttcaaggtgcaggcgaaacgactgctgctgcatctgcgcagcttccggctcgtagtggtaatccagccctgtctcgccgatcgcaaccacatgcgggtgctgcagctcgccaagcaaccagtccagcaccggctggctcgtcggctcgagatccagaggatgcacgccgatcgagcagtccacatccgcatagcgctcggccaacgctctgaccgccgctgcgttatcggcgctgacacctatgcagaggaaatgcccgacaccacgcgatcgtgcagcgtccagcgcggcgtccagtgagccgtcgtgggcagtgaggtcgaggcggtcgaggtgacagtgggaatctaccagcatgaaaagcactacttgctatcgcgaaaaaaggagcgattgtagagcaaatgaccggtattcagggaaggacagtgggcctgcctggccgcacagggcgcttgcgttacatggtgtgggtcgggcgatccgacttgagggcaccggccagataggtttcgatcttgttgcgcgcggtgctgtcgccctcgttgaactgcacgccaattcccgcggcgcgactgccctgggcacccttgggggtgatccagaccacctttccggctacgggaatcttttccggctcgtccatcaggttgagcagcatgaacacttcgtcgccaagcttgtagctcttgttggtcgggatgaacagaccgccatgcttgatgaagggcatgaacgcggcatagagcaccgatttgtccttgatggtcagggacaggatgccattacgcggaccaagatttgctggcaggctcatgcggtgttcctaacgaaaattccggtcgattctagcccgcgccgggcagcgttgcccactgcaccagcagcgcttcgagaagcaacacacggttgaggttggctttgcctagcactttctgccgatgttcgagcagccagtcctgcaacgccatgattttatgctgcggcgacttctgcgccaggtactgcaataccttttgcatatcggcagcaccgagctccgcttcatcaccggccatctggtaacgcagaatcagatgcgcccactcacaaaaccagtcaaagagcagaatcagcggcaacgcgttccagccctcggcgagctgactgggcgactgttgctgcttgagcagcttcttcaccccttcgacgacctgggcgcgcaggtccagcactttctgctcatgcagcttcagcgctgccagaggcgaccccgccgccagcgtcagcaactgttcacgcagctccggagccagttcaggcaattgccctgccagccaatcgaggctctgctgccgcccaggcagcgggcaggcctgctgcacacagcgactcttgatggtcggtagcaagcggcttggctgatggctgatgagcagcagcaccgtatcgccggacggctcctcaaggctcttgagcaatgcgttggccgcgttgaggttcatcgcctcggccggctccagcaatatcaccttgcgcccgcccagctgcgccgtctgagtgacgaagccgaccagatcacgcacctgatcgacgcgaatggccttgtcgacctcctccggctcgagaatgtagtgatctggatgagtctgtgccgccaacaactggcaagccttgcaagcgccacaagccatgccattcaccgggcgctggcaaagcagcagcgccatcagctgctcggccagcagccttttgccgatgccgccagggccatgcagcaggtaggcatgggcatgctgcgagcgccctgccagctgtcgccagagctcggcctgccagggaagaacgtcagccatcaaggcgctccatcagctctggaatcagcgcctcgacatcacgctgcactgcggtaagcgattgcccggcgtcgatgatccgatagcgtgccggtgtggcctcggcgcgatccaggtaggcatgtcgtaccgcctcgaaaaagcgcatgccttcctgctcgaagcgatccaggcgcccccgggcagccgctcgagccagccccacctcgatcggcagatcgaagatcaacgtcaggtcaggacgcagatccccttgtacgaaggtctccagttgcgcgatccgctcgaccgaaagtccgcgtccgccaccctggtacgcgtaagtggcatcggtgaagcgatcacagagcaccaccgccccccgttggagcgctggccggatgacctgcgccagatgctgagcccgcgctgcaaacaccagcagcagctcggtatccaccgccatcggttcgtcggcaggagtcagcagcaactcacgaatacgctcggctaacggcgtgccaccgggctcgcgggtcagcacgacatccacgccgcgcgctcgcaggtgctcggcgaggtattcacgattagtgctcttaccggccccttcggggccttcgagtgtgacaaagagtccgttcattgcgcgctctcgctgttgaccggcgcctgccacggcggcggactggaacggtagtcggcacgccgcttgagctggtactcgcgcaccgcccggttgtgctgatcaagcgtatcgctgaagacatggctgccatcaccgcgagcaacgaaatagagactggtaccgtctgccggatgcagcgcggcatgaatcgcctcgcgcccaaccatagcgatcggggtcggcggcaggccggcattggtgtaggtattgtagggcgtcggcgtgcgcagatcggtgcgagtgatccgtcccttgtagccatcgcccataccgtagatcacggtcggatcagtctgcagcaacatgccccgtgccagcctgcgcacgaagacacctgcgatctcgccccgctcttccggcacaccggtttccttctcgatgatcgaagccatgatcagcgcctgatatgcgtcctgatacggcaagccttcggcgcgctgctgccactcttcttcgagcacctgctccagacgcgcataggcacgtcgcagcagatctacatcggacgtgccgcgggtgaatcgataggtgtcggggaagaaccgcccttccggatgcaaatccggtgcgccgatgcgcgccatgatctcggcatcagacagcccgtccagggtctgctgcagtttgggctgattcaggagggcgctgcggagctggcggaaattccagccttcgacgagcgtcaggctgtattgcacgacttcgccacgcttccataatccgatcatgtctcgcgcggtcatgcccggagtcagacggtactcaccgctgtgcaggctctgcccggacaggttcagccgccagtacagccgcaaccagaacgcatcatccaacacgccttccgcttccaggcgctgaaaaacgccgctgggcgtatcgcccggacgcacatcgagcagcaaggcctcgtctgtcacgaccagcgattgctcgagcgcagcatgctgcttccaggcgaacaatccgagcgagattgccgctaacagcactacggctagcagcagaatgagaattttacggatcacgaatcactcaacaggtcggcaacaacggcctgcagtttacgggtcagcggaccgaccggccagacacgttcggccaaagctgtaacaggccagataccgtagaggctgttgcaaaggaacacttcgtcagcctgtagcagttcggcatagctgatgtcgctctcgaccacggtgcgcccatgctgcgatgcacaggccatgatctccgctcgcatgacacccgcaactccgcaccgtaccagcgacgcggtgcgcagttcaccgtcgacaaccatgaacaaattgctgaaaacaccctccaccaccctgccagacatatcgcgcatcaacccctcggcgtagacgggatcgtgccattcggcacgcgccaacacctgctccagccgattcaaatgcttgatgccggcgagccgtggctgctcggccaggcgtgtctcacaaggaaaaagccgaatcccggcgagggcgttctgtggcgggtaggcgggaagaggcgagcctaaaagcagccgttgcggctgacagggctcgggcggggcataaccgcgtcgcccggtgccgcgtgtgacgatgagcttggcaacaccccgccccaggacttggaagaaccgcgccaactcgttgcgcagctcatcaatatcaattgggatagcaaggcgctgacagccatcgcgcaatcgctgcagatggcgatcgagcagcggagcctgaccatccgcgacccgtatcgtctcgaatagcccatctccataggccaggccgcgatcatgaacgagcagccctatacagggctgcccgttcagccagctcgatgtcactcggcaaaccggcggaataccagcgaaccgttggttccaccgaagccgaaggagttggacaccgcgacgtcgatcggcctcggcttggcctggtgcggtacgaagtcgagatcgcagccttcgtcaggctcatgcagattgatggtcggcggggcgacttgatcacgaatcgccagaacgctgaagatcgcctcgacagcaccggcagcaccgagcaggtggccgaccatggacttggtcgaactcaccgacagctcataggcatgatcgccaaacacactgcggatcgcagcagcctcggccttgtcgcctgccggcgtggaggtcccatgcgcgttgatgtactgcacctgctcgacattaagctgagcgtccttcagcgcgttacggatgcagcgcgccgcaccggcgccatcgtcgggtggcgacgtcatgtggaaggcgtcggcactcatgccaaaaccaatcagctccgcatagatatgcgcgccgcgggccttggcgtgctcgagttcctcgagtaccagggcaccggcaccgtcggacagaacgaagccatcacgctccttatcccacggacgactggccgcagcgggatcgtcgttgcgcgtggacaacgcccgcgccgccgcaaagccaccaataccgagcccgctggcagccatttcggatccaccagcgaccatcacatccgcctcgccataggcgatattgcgcgcggccatgccgatgcagtgggtgcccgtggtacaggcagtggcgatcgcatagttcggaccctgcaatcccaagtggatcgacaggaagccagacaccatgttgatgatggaacccggcacgaagaagggcgaaatacgccgcgggccctgttcgatcagcgccttgcagctgttttcgatgttggtcagaccaccgataccagaccccatcgcgacgcctatgcgctcccgattggcgtcagtgacttcaagaccggaatcccgcacggcctgaaagctcgcagcgaggccgtactgaatgaacaagtcgagcttgcgtgcttccttagccggcagatactgctcgacatcgaagcccttgatcgacccgccaaaacgagtggaataggcagaaaggtccatgtgctcgatcaggccgataccactacggccggcgagaataccctgccagctgctcggcacatcgttacccagtggcgaaagcatgcccatcccggtgactacgacgcgtctacgcgacacagcgattactcctatacctaacatgctcggctcggctcccgtcgtaacaggaacgatccttggatcgagtgccggatagcaccccgtgacccagatgaatctctctcaaagaaaagccgcactacctcgatcaaggcagtgcggctttcctgtttccgaagcggattacaacttactgcgcgtgcgcattgatgtaatcgatggcttcctgaacggtggtgatcttctcagcctgctcgtccgggatctcggtctcgaattcctcttccagagccatcaccagctcaacggtgtcaagagagtcggcacccaggtcttcgacgaaggaagcgctgttggttacttcctcttctttaacgccaagttgctcggcaacgattttcttgacgcgttcttcgatggtgctcataccttgttttcactcctatggaaaaatcaggcagctggtttgcgcggtagtgtatagaaagcgttttccgcatttcaagctggaagcaggcaagcatgataccgccttcaaccatctgtctataaaccagctgatgttttatagctaatttaaagacagccctaagactgtcctccttcgccgggtgtcacatcaactcatgtacatgccgccgttcaccggaacagtagccccggtgacataggcagcgccgtccgaagcgagaaacgcaacgaccttagcaatttcttcggcctgaccgagacgtcccaggggaatctgccccaggagcgcatcacgttgggcttccggcaactcgcgagtcatatcggtatcgatgaaaccaggcgccacggaattcaccgtgataccgcgcgaaccgacctcacgagccaatgcacgactgaaaccctccagaccggccttggctgccgcgtagtttacctgtccggcgttgcccatggcaccaaccaccgaaccgatattgatgattcgcccccagcgggccttggtcatgccgcgcagcacggccttggacagacgatacaggctactcagattggtattaatgacgtcgtgccactcgtcatccttcatgcgcagcatcagattgtcgcgggtgataccagcattgttgaccagaattgcgggctgcccgagatgctgctgaatgtgttccagagtactgctgaccgactcgtcattgccgacgtccagcaccaggccggcaccttcgataccgttttccttaagagtctcggcgatacgctcggcgccagaagaagtggtagcagtgccgatcacgattgcgccctgacgcccgagctcaagggcaatggcctggccgataccgcgactcgcacctgtaaccagcgccaccttaccttgcagattcatagcattctccttgttcaagccagtgccgcacgagcggccgcaaaggcctcgggggtatcgagattgtaagtattgatgcccttgacgcagcgcttgttaaggcccgaaaggaccttaccgggaccacattcgaccaaggaagtcacgccacgctcacccagggccaccatcgactcgacccagcgcaccggactgtacagctgcgccagcagatcgcgcttgagcgtatccagatccgccaccacggccgcgctgacgttctgcaccagcggaatctgcggcgcctgccaggcaatcgcctccaccgaggcggcaaaacgctctgcggctggacgcatcagatcacaatgggacggcacactcaccggcagcgccattgcacgcttggcgcctttcgccttacatgcttcgattgcccgctctacggctgcagcacttcctgcaatcacgacttggccgggagcgttgaaattgacagcgctgaccacgtcaccctgcgacgcctcggcacacgccgccagcacatctgcatcgtccagcccgagaatggcggccataccaccctgccctgccggtacggcctgctgcatcaactgaccacgcagctcaaccagtttgactgcatcggcgaacggaagactgccggcggccaccaacgctgaatactctccgaggctgtgccccgcaacgaaggcaggctgcgcaccaccttcagccagccacagacgccagattgcaaccgaagccgccagaatcgctggctgggtcttgtcggtctgattcagttgctcttccgggccgttctgggtcaatgcccagagatcatagcccagcgccgaggaagcttcggcaaacgtatcgacgatcacgctctgctgagcacccagctcggccagcatgccaagggactgagacccttgaccgggaaagacgaaagcaagtgatgcggacatgaaaacgactctcttgtggttctgttcgtctgaagaatacgccagtgacaggcgcagcgaatttcagttggatggctcgccatcagctgcagtcacatcatcgcccgcaacggaaggacgagcgccaccaagataatgccccagtcgacgcgccagctgcccgggaagatcatgctcgacgtcctccgctgcacgccgaacggctgctttgaagccgtccgcaccagcaccgccatgactcttgacgacgatgccctgcaaaccgagaaaactggcaccgttgtattgcgcaggattcagctctgcgcggagccggcgtaaaagcggcaacgccatagcaccgacgatacgcgccccaattgaccgcctgaaaagcgcctcaaccttggcgaccagcatgcccgccagcccctcgctggacttgagcaatacgttgccgacgaagccgtcgcaaacgacgacatcggcctcaccgcgataaaccccatccccctcgacgaaaccccggtagttgatgtccggcgcttgctgcaaaaggacagctgcctgcttgacctgctgggtacctttgatttcttcggtgccgacattcagcagcgcaactcttggctgatccagccccagcgactcggctgcgaccacccccatcaccgcaaattggtatagctggtcggccgggcagtcgacgttcgcgccgagatccagcaacagacaggggttaccctgcgtgggtagcgctgtcaccatcgccggccggtcgatacccgggagagtcttcagtatctgacgcgccagcgccataagcgccccggtattgccagcactcacacaggccctcgccttaccgtcgcgtacctgctctagggcaacccgcattgatgaacgaggcttgccgcgcaacgcctgagcagggcgctcgtccatgccgatcgtttcgggcgcatcgacgattttcaggcgcgaccgatcgatccctggatgctgggcaacgagctgttcgagtagagagacttggccgacgaggaccagatgcagcgaggagttttcaaccaggcaggaaagactggccggaacaatgcagtggggaccgaagtccccacccattgcatcaatcgcgatgatcggagcggacaaggattactcgtcagcgcccttgtcgatcaccttgcgaccacggtagaaaccatccggggaaacgtggtgacgcaggtgaacttcaccggtgctcttttccacggacagagcgttcggcacgagagcgtcatgcgaacgacgcatgtcacgggcggaacgggattttttgttctgctgaacagccatttggatcaactcctaaacgtttgggtcacgctttaactgcgccagtacgctgaacgggttggaccgcgttacctcgtcctcactcggctcaggctcatctggcccaaccggcggctggcaaatttcaggggcatggagtggaacaatcggcagagcgagcaacagctcgtcttcgaccagcgccagcagatccagaggatcctctcccacttccagcacgtcataccctttaggcaggtgctggctgctcgccccttcattcacaacggcataatcgcattcactgtgaatcggcagaacaaccggctccagacagcgctggcaaatcatcttgacttcaacatcgagctcactgtggataaccgcagtacgctgttcatcacgcccgaaagtaaaactggcgcgcaccgcaccctgatcaccttcaagaggatcagtgagccgcttgagccgtgacaatggcagctcaccggcaagggtggccgctcggtcagcgagcttacgcggatcaacgtgcggaggtatcggtcctttcaacataagcgcggcattctagggacgcacctgcgacctgtcaaaggaattccgcgcgcgttcacgacacagcgcatagaatctttctacctatatataggagggaatcatgcgccacctactgctcgcatccagctcacggtatcgtcaggagctactatcccgcctacgactgcctttcgacagttgtgcgccggaaatcgacgaaaccgccttccccggcgagaccgcagaacacctcgtgcgccgactcgccgagtgcaaggcccacgccctatccgatcgctacccagatagcctgatcatcggctcagatcaggtggcggtactgaatcaagagataatcggaaaaccacatacgttcgaacgagccaagcagcagctgctagccgccagtgggggcagcgtcagatttcttaccggcctggcactgctggacagcatgaacggtagattgcaggtggcatgcgtgccgttcaccgtgcattttcggtcattggatgaagcgcgaatcgagcgctacctgcaaacagaacaaccctacgattgtgccggaagcttcaaggccgagggactgggcatcagcctgttccgcaccaccgaaggcgaagacgtcaccagcctggtgggtctgccactgattcagctggtggacatgcttctgaacgcaggcgtcgaagtcccgtgaagcgggcgcactaccgcagagccggcccctgcaatccaaccaggattgccagccgctcagcaacaccagcgcccagcttcttggtgaagcgatcgagcggcgactccttgatcgtgaaatcgaccatctccggctcgccaatcacttcgcgagccacatgagcagtgctacccagaccatcgataagccccagctccaaggcctgctctccggaccagacgagcccggagaaaagctcgggatgctgagcatcctggagacgatcaccacgcccacgcttgacggcctcaatgaactgctgatgagtggtggcgagcacgccacgccagaactggctctcctcgggcttttctggctggaaaggatcaaggaacgccttgtgttctccagctgtataaacccggcgctcgactcccaatttggccatcgtatcgacgaagccgaaagtggcagcagtcacgccgatcgatcccaccagactggatttgtccgcatagatctcatccgccgcgctggcaatataataagcacccgacgcacccaggtcggtgatcaccgcataaaccttgatcgccggatactcaccgcgcaaacgccggatctcgtcatagatatagcctgactggacgggactgccgccaggactgttgatgcgcagcaccacacccttggtgttggcattttcgaaagcggcccgcaaggcgccgactatattgtcggcactggcagactcttcatccgcgatcattccgcgcacgttgattacagccgtatggctttcctgcgcccccttgcttttaccgaactgcaaggccggcgaaaacaaggccagtgcgccgaacagatatacaaatgtcagcagcttgaagaatatgccccagcgcctggcgcgccgctgctcctgaacccccgcaagcagcgtcttttccagcagcttccagctattgcgatcttccttggattcgtccaccggagccttccactcatccgacatttacatgcacctcagtaccagccgcggagcgcagccaactgccgagctccgaaaagtgattgatcacagcgcgaggctcatgccgccgcaggatatgcagcggttgcgcaccataggcgaccgccacactgtccactccggctcgccgcgccatctgtagatcgaatatcgaatcaccgaccatcagggcctgctccggacgagcaccgcaatgagcgagaatctcttgaatcatcaagggatcgggcttgctcgccgtctcgtccgcgcagcgggtgatatcgaagaactcctcccagccctgcccggccaaaacgcgatccagaccccgccgccctttgccggtcgcaatcgcaagcaaataccctgaatctcgaaattccgacagcgccctggcaacgcccggatacagcgccgaaggctgagcttccagggcaagatagtgttcgctgtagaaatggcgaaaatcgtcgattagcccgatatcggcccgttccggatacagctccgtaatagcctcgggaagagccaacccgatgatgcctttgaccaggtcgtcgtcgacttgcggtagcccacaactgcgagcagcaacatgtatggactcgacgatacggccaattgaatcgaccagcgtgccatcccaatcgaatatcaggacctgatacttactcaccgagacgctccagcgttcgcgcccacatttcgtcgaccggtgcctctagcgacaattcacccccatccggcaacggaaccttcaaggcatatgcatggaggaacaaacgcttgccgcccagctcgcgaatttcgcgagtgaattcttcgtccccgtacttgctgtctcccgcaatgctgtgccctgcgtggcgcgcatgcacccgaatctggtgagtgcgtccggttacaggtttggcctcgaccagcgttgcgaactctccgaagcgacgaagtacgcgaaacagcgtcagcgcctccttgccatcctcggtcacctcgaccatccgctcaccggagcgcagcgtattcttcaacagcggtgcattgacctgcttcttggatgcctcccaccgcccgcggacgagtgccatgtagcgcttgtcgacaccatcgccacgcagagcctgatgcaagtgccgcaacatgctgcgtttcttggcgaccatcagcaagccggacgtatcgcgatccaatcgatgcaccaactcaagctccttggcatcgggtcgcaattgccgtaaggcttcgataacgccgtagctgagcccgctgccgccgtgcactgctatgccggccggcttgttcagcacgatgagcgccttgtcctcatagacaatggccttatcgagcctctccagtagcccctgagccagcggctcaggctcgtcacgctcggccagccgcagcggcggcacacgcaccagatcgccggcttgcagtttgtactccggcttgatgcggcccttgttcacccgcacttcacccttgcgcaggatgcggtagatcagcgtcttgggcacgcctttgagctggttacggagaaaattgtcgattcgctggccggcgagttccggcgcgacctcaagtatttgcacaccggaggtctgggagggggtattggtca

SEQ ID NO: 84 - DNA, 25716 bp, Unknown
  From metagenomic library of CO182
ctgttcccagggacgctggtactgcagcagcaggcgtccctggccgggtagggtggcctggaagcgccaggtggagaggccggcgctgccgacgatgccggcatcctcgggattgcggtagacctcctggccaagctgggcgagcacctggggcgcgccatcgaacagttgccagcgaaagccggtggtggggttgcttggcaggttgaggatcagcgtctgcccgcgcttgagctcgatcggcgtgcagcgcgcctgctcgccggggctgacctgcagggcccgggtcgagggttcgatgctgacgctggtgggctgaccggcacagccggcgagggccgccaggaccattagcaggctggtggaacgcagcagagacatcgggcgactcctgtcacaagggcgaaagcgggccatcagaatagaggcccgcagccccaagggcaaagtcaggcgaacgccgggagagtcggttcagcccaggctcaggtgaatctcgcgcaggcgcccgtcgatcagcggggtgagcagcgcgaagcagtcgccggggcggatgcgcacctgcggtgcatcgatcagctcatgctgcaggcgctgcagcggcaggtaccactgcgggtggcgggcatcggcgtgcaggcgctggcacaggtagcgcatctgcacctgcaggggcagcgggcagtgcgtatgctgggcgccgcgcacggccaggccgcgcagctgggccaggtcttccagttcgcgacaggcctgggccaggccgctgacccggcgctggcgcgtggccaggcgcagctccagctgttcgagggcgttgagcagttgctcgatcagccggcaatgcccggcgaagtcgcctggcgtctgacgcagcgcacgccactggccgtccagctcggccaggccgctgtcgtcctgcggacaacgccgccacaggttgccgatttcctcgccgagctggcggcatttgtctgccgcctcgctgctgttctggccacccagcccgcgatgctgctgcaggcgctgcaacagttcgagggccacatgcagggtgctcagccaggcttcggtctggcggcgcagggcctgctggcgcaggcgggcggcgagcagcgccgggatcagcaggccggcgagcaggagcagggcgctcaggggactggtcatgggcgggcctccagggctttttcccgatgtggctgtgccgcagcgggagcggaaccgagaatgtcggtcatctgggtcaggtacagggtcaactggtgcaggcgctggttatcgctgctctgccggctcagcacatcgctgatctgctgcaactgctggttgagcgactggttggcctggctgtgctcgccgagggcctggcgcatgctggccagctgttcgaggttgctgcggctgtcgctggccagggcgtcgagattgccggccagttgcaggctctgctggttgccggcgaccagcagatggcggtgctcatcgacctgatggcgcacttcggccacggcctgggcgatggcgccgaccacctgggtgatatcgctggcggcctggctggtggactgggcgaggtggcgcacctcgtcggcgaccacggcaaagccgcggccctgctcgccggcgcgggccgcctcgatggaggcgttgagcgccagcaactgggtctgcttggccaggccctggatgctgccgacggcctgttccaccgctgcggtgcagctgagcagttcgccaaccgcgccgctggtacgccccaggctctgctcgatatcgaacagcgcattgcccactttgtgggcatcctggcagccatcctcacttctttggtgcgtctggccgaaggcctgcatggcgtgctcggcatgttcgcggatctgcagcagggtctggctgatctgttcgctggccgccgcgatcatcgcgacccgctggctctgctggctggcctgggtctcggtgtgttcggccatctgctccagggcctggctggcgaactgcacctcgctgcgcaggcgttcggccatgcgctgctgctcgcgacagcgcaccagcagcgcttcgccctggggcgggctggccaggctttcaccaagcagaatgagtgtctgctgcagggggcgcacatgccgctgccagcgctgctgcaacgccgccagcagatacagcgccaggcccagcaagaccatggcagctcccgcctgttgccgccaggccagcagcaccgcgaggctggcgagcagggcgggtagccaggcgcgcagggcgccgcaacggttgaggatgaaaatgccgaactccagcatggcagtcttccttgtgaccagtcactacaacagggttcagcagggtgatagcaagatactggccagactatgttctatccgttagtcgcagcgataacgcacgtctgcgcggcagtggttacagtaggggctgaatctgtccctgaacctgccgcccatgtacaacgcccgcctgctgcgcctggatgaccaggcccacgaacatgcccacgaccaccaccagttggtgctgtcgctgtccgggcgtgccgagttcgaagtgggtggccgtggtggcgaggtctgccagatgcgcgcctgcctggtaccgggcgatgccggccaccagttcgccggggtgggcgacaaccgcatgctgattctcgacctggccgagccggtgagcgcggatgaggatggcgcgctgctggcccagctgttcgaggtgccgcgctacccgaccctggatgccgacttccatcacctgctcagctatgccggcgccgagctggcccgctatggcagcgacccgcagctggcccgtgcgctgggcggcgtgctgctgcgcgccctgcacctgcgcctgtttggcgagcagccgcggcgggcaccgagcgcgctggatctgcagcgcctggatgcctacatcaacagccacctggcacggcgcatcagcgtggccgaactggccggagtggtgtgcctgagtccgagccatttccatgcgcagttcaaggatgacgtcggcctgacgccgcaccagtacctgctcaagacccgcctcgatcatgccagccgtctgctgcgggaaagcccgctgccgctggtgcggatcgccgaggaatgcggcttttccagccagagtgcgctgaccacggccatgcgccgctacctcggcctgactcccaggcgcctgcgcaacagctgataccgcgcccttgcaggcgcggttgcctgcgcttgctcagacgtggaagaaactcacccgatcgctcagctgactggccagacctgccagctcgcggctggcgccggccatcagttccgaaccggcggcggtctggcgggtggcctcgtggatgcggctgatgttctggttgacctcttcggcggccaggctctgctgctccgacgcgctggcgatctgcgcattcatgctgttgattgagctgacctcctgacggatcttgcccagcgcgctttccgcctggctggtctgttccacggtttgccgggccagctcgcggctggcatgcatcaccgtggccgccttgctggcgccgtcctgcagcttgccgatcatctcgcggatttcccgggtcgattcctgggtgcggctggccagcgagcgcacctcgtcggccaccacggcaaagccgcggccgtgttcgccggcgcgggccgcctcgatcgccgcgttgagggcgagcaggttggtctgttcggcgatggagttgatcacctcgatgatggtctcgataccggcgctgtcctgggaaacctgctccacggtgctggcggcactttccagagtctgggccaggtgctggatgccgccggcgctttccttgaccaggctgttgccctggtcggcttcgctgtcggcgttgcgggtggcggcggccgccgtgccggcatagctggcgacttcgttgacggtggcggccatctggttgatggcggcggccatgtgctcggtttcatcggactgcagacgaatctgctgctggttgctgtcggcggtcagttgcagggtcgccgcggccgccgccagttgctcggcggcactgcgcacctgcacgatggttctggccaggttgcccaggctggcgtgcagagtgcccatcacgctgtccgggtagcgggtgtcgagctgctgtaccagctcgccggcggccagtttgcgaattgcctcggcgacctgatagggctcggcacccagggtggacttgagctggcggatgatcagcagcgagacgatgccgctgagcaccgcaccggccagggtgaccatgaggatcagccatttgaagccgttggcggcttcgcgtaccgacccaacccggtcactgatgatgccttcctcgtaatcgatgaaggcgttgatgcgtttgagccattcactgtaggccggtgatgcctcgctcagcagcagactgacggcggcttcgcgattgccgctctgacgctcggcgatcagtcgcgtggtgagggccagggtgctctgttcgatgtcgttgatctgcgccagcaggcgtttttcttcggcagtcgcttgcgggctgctgaccagttgcttcatcggcgtggccgattcggcataaaagctggccagccgatcgatctcccgcaggtggccctgcagagccatgttgtcctcgaccagcacggcatcgcggatggcaatggcgcggtcatgcacgctgccgcggaagttgatggcatagcgctgcttgagtgcagcgttctcgctgacatgggtgagggtgcggtcgatgaagttgacgcgctgcatgccgatcaggctgaccagcaacatcagcgacaggatcaggccgaagccgagaccgaggcgcagggcaatgctcatgggtgggcgcatgacgagctccggggtggtttaaggtttgacgtcaatatgatgtcagtatggcatcgcccgcgccaatacttatttgtacattttctatcgcttgtataggttttgtttaataagcccttcgtggtctggattcaaacgagcgtttttccctgcggagttttctgcaaaaacttcgcagttttctgcaagaagctgtcatcaccctgccactacattcgcttatcccgcctgggactggtgctgatcgcctgttgatctgacgccggccgggcaatgggctagaccgaataacaacagttctccacaagagaggaggggcgtgatgttcaccgccagtcacgtcttgcagggcgactttctcaaaaagacagccgccgagttcttccccgccatcagcgccaattacgccgtcgacgaggaagcctacctgtatgagctcctgcagctcgccgaccccggccctgccggtatcgaggctatccgccgcgatgcccgcgccctgatcgaacaggtgcgcagccgggacaatgccgtcgataccctcgacgcactgctacgccagtacagcctcgatacccaggaagggctcatgctcatgtgcctggccgaggctttgctgcgcgtgccggacgccgccaccgccgacgcgctgatccgtgacaagctcaatgccgccgaatgggaacggcatgtcggcaagagtgacaacgtgctggtcaacttcgccgcctggggcctggtcatgaccggcaaggtggtcaacctggacaacccgcaaggcaaggccggcagcgtgctgggcaagctgatccagcgctctggcgagccggtgatccgcgcggcgatgaaccaggccatgaagctgatgggcaagcagttcgtgctgggccgtagcatcagcgaagcactgaagaacggccggtcgtgccgcgaacagggctacacctattccttcgacatgctcggcgaggcggccctgacccaggccgacgccgagaagtacatggccgactaccgtcaggccatcgataccgtcggcgccgagccgcaggtcgggccgggcccgcgcccgtcgatctcgatcaagctgtcggcgctgcacccgcgttacgaagtggcgcagcgcgagcgcgtgctcaccgagctgttcgccaatgtgcgtgagctggccatccgcgcgcgcaagctgaatgtcggcatctccgtggacgcggaggaggccgaccgcctggaactgtccctggaactctacgagaagctgatgcgcgacccggccattgccggttggggcgagtttggcctggtggttcaggcctattccaagcgctgcctgccggtgctggtgtggctgaccctgctgggtaaggagctcggcgcgaagatgccgctgcgtctggtcaagggcgcctactgggacagcgagatcaagcagtgccagatgcagggcgcgccgggctacccggtctttacccgcaaggaaggcaccgacacctcgtacctggcctgtgcccgtttcctgctcagtgaacacacccgcggcatcatctacccgcagttcgccagccataacgcgcacaccgtcagctgcatcctggcgattgccgccgaacagcagcagccgcgcgagttcgagttccagcgcctgcacggcatgggcgacgcgctgtacgacaccgtgctggagcagcaccgcaagaccgtgcgcatctacgccccggtcggcgcgcacaaagacctgctgccgtacctggtgcggcgtctgctggaaaacggtgccaactcttcgttcgtccaccaactggtcgatccggccgtgccggtggactcgttgatcgagcacccggccagccaactgcgccagttccagaccttgcacaacgaccgtattcccctgccgctggcgctgtttggcagcgcgcggcaaaactcccagggcatcaacatgaatatcctcagtcagtgggccggtctggagaccgacttcaacgcccagttgggcaagacctggcaggccgcgccggtgatcaacggcgaaacgctcgccggcaccgcgcaggacgtgcgctgcccctatgacctcaaccgactggtcggcacagcccagtgggccagcgccgcccaggctgcccaggccatggacgtgctggccggcgcctggccgcgctggaatgccacgccggtggacgagcgcgcgagcatcctcgaacgcctggccgacctgctggaaatccaccgcgccgagctgatggcgctgtgcaccctggaagccggcaagagcctgcaggacggcatcgacgaggtgcgcgaagcagtcgacttctgccgctactacgcccagcaggcccgcctgcgcctgggtcgcgaggaactgcaggggccgaccggcgagcgcaacgagctgttccatgaaggccgtggcgtgtttgcctgcatcagtccgtggaacttcccgctggccatcttcctcggccagatcagcgccgcgctggtcgccggcaactgcgtgctggccaaaccggccgaacagaccagtctgatcgccgcgcgcgccaccgagctgctgttcgaggccggcctgcccaaggatgtgttcgccctgctgccgggcgatggtgccaccctgggcggcgtgttctgccgcgatgcgcgcaccgccggggtgtgcttcaccggctccaccgaggtggcccgcctgatcaaccgccaactggccgacaagccggggccgatcgccgcgctgatcgccgaaaccggcgggcagaacgccatgatcgtcgactccaccgcactgcccgagcaggtgatcaaggatgccgtggcgtccgccttcaccagcgccggccagcgctgctcggccctgcgcgtgctctatgtgcagagcgacatcgccgagcgcgtcatcgacctgctcaagggcgccatggccgagctgaccgtcggcccgacccacctgcgcgagagcgacgtcggcccggtgatcgacggcgaggcccaggccggtctggaagctcacatcaagcagctcaaggcggccggcaagctgattgccgaagccaaactgtcagcaggtctcaatggccacttcgtcgccccggtggcgttcgaaatcggcggcatccacgagctgggcaaggagcacttcggcccgatcctgcacgtggtgcgctttgccgccagcgagctggaacaggtggtggcggcgatcaatgccaccggctacggcctgaccctgggcgtgcacagccgcaacgaggaaacagcccgtcgcatcgagcaactggcgcgggtgggcaatctctacgtcaaccgtaaccagatcggcgcggtggtgggcgtgcaacccttcggcggttgtggcctgtccggcaccggtcccaaggccggtggcccgagctacctgctgcgctttgccaacgagcgtaccacctcggtcaacaccaccgcggtgggcggcaatgcctcgctgctgtcgctgggcgacagccactaggcagcagagccggaacaccggttgtaggttgggttgaggagcgcagcgacgaagcccgacgggtcacgcccggttgttgggcttcgctacgctcaacgccaacctaccgctggtgttcggattatccacttcaggagggagtggcgtgatgcgccgccggtgagcggcgtcaatcagagacatctgtcggcagatcgccgcagatcgactccgaggcccgttatccacgggcaacttgccagccaatcgccgcgcgctacccgtcgcggcgcataacaacaaccaagagggtatcccccgatgactgctagtactcccatgctgatcaccttcgtggtgtatatcgccgcgatggtcctgatcggccttgttgcctacctgcgtaccaagaacctgtccgactacattctcggtggccgcagcatcggcagttttgtcaccgccctgtcggccggcgcttcggacatgagcggctggttgctgatgggcctgcccggcgccattttcatcgccggtatctccgagagctggatcgccatcggcctgatcgtcggcgcctacctcaactggctgttcgtcgccggccgcctgcgcgtgcagaccgagcacaacggcaacgccctgaccctgccggactacttcaccacccgcttcgaggacaacagccgcattctgcgcatcttctcggcgctggtgatcctggtgttcttcaccatctactgtgcctccggcgtggtggccggtgcccgcctgttcgagagcaccttcggtctctcctacgaaaccgccctgtgggccggcgccgcggcgaccatcgcctacaccttcatcggcggcttcctcgcggtgagctggaccgacaccgtgcaggccaccctgatgatcttcgccctgatcctcaccccgatcgtggtgatgctggccaccggcggtgtcgatccgaccttcatggccatcgaggcggtcgatccgagccacttcgacatgctcaagggcgccaccttcgtcggcgtgatctcgctgatggcctggggcctgggctactttggtcagccgcacatcctggcgcgcttcatggccgccgagtcggtcaaggccatcccggctgcccgtcgcatctccatgacctggatgatcctctgcctgggcggcgccgtggccgtgggcttcttcggcatcgcctacttctccgcccacccggagctggccggcgcggtcaaggaaaaccccgagcgcgtattcatcgaactggccaagctgctgttcaacccgtggatcgccggtgtgctgctgtcggccatcctggcggcggtgatgtcgaccctgagctgccagctgctggtgtgctccagcgccctgaccgaggacttctacaaggcattcctgcgcaagaacgccagccagaacgaactggtctgggtcggtcgcggcatggtgctgctggtggccgtggtggccatcgccctggcctccaacccggaaaaccgcgtgctgggtctggtgtcctatgcctgggccggtttcggcgcggccttcggtccggtggtgattctctcggtgctgtggaagggcatgacccgcaacggtgctctggccggcatggtggtcggcgcggtgaccgtggtggtgtggaagaactggatcggcatgggcctgtacgaaatcattccgggcttcatcctcgccaccctggccatcctggtgttcagccgcatcggcaatggcccgtcggcggccatgtcccagcgcttcgacaaggccgagagggaatacctcgacgcccagtaatcgcgctgcaatgaaaaacggcccgcgctccgagaggaggcgggccgtttttcatgggtgatggtaggttgggttgagcgccgcgaagcccaacaacgggaatgtgctttaagcctgacgctttgccagccagtgacggtagcggtgggtcaggcggcccagacgcaggcggtcgagcaacagcgagacgacgggggaggcgtccggcttgctggtccggcggctgcccaggcggcgcagctggcggcggataacggccatggtggccacggccgagagcaccttgtcgttccagttcaccaccggcagttcggctacggcatcgtcaccggcctgccagcgggccggcaggtccgggatcaccgtcagcgccgtggccatgccgaccacagccaccccctggctcagcacctcttcggccaccgcgcggcggcggatgccgccggtggtcatcagcggcatgcgtgcctggccggccagctgcgcggcgaattcgaggaagtaggcttcacgcgccagggtgcggccatcggcggtgcgcccctgcatggccgggctctcgtagctgccgccagacagctcgaccaggtccaccggcagttcgttgagcagctgcagcacggccagggcatcggcgtcatcgaagccaccgcgctggaagtccgccgagttgagcttgaccgccacggcaaagcgcggcgaaacgcgtgcgcgcacggccttgatcacctccaccagcaggcgcgcgcggttttccaggctgccgccccagcggtcgctgcgctggttggtcagcggcgagaggaactgcgacagcaggtagccgtgagccgcgtggatctgcacaccgtcaaagccggcctgttcggccagttgggcgctgctggcgaaacgttcgatcagctcggcgatgtcccgctcgtccatggccctgggcacgccgaacagtttcgagtgcttgcccaggtccagcgccacggccgagggcgcccacagcttgccgcccaggttggcgtaggtctgtcggcccggatggttgagctgcatccacacctgcgcgccgccggacttggccgcctcggcccagtcgcggaacggctgcagcggcacacccggttccagcaccacgccgccggggccggtcatggcactgccatcgaccatgacattgccggtgatcagcaggccggtgccgccctggctccagcagcggtacaggtcgatcagggtggcgccgggcaactggccggcttcggcaaggttttcctccatggccgccttgcccagacggttgggcagcacggcgccgcagggcaggggcagagggctgaacagggcggaacgggacatgggtaactccggaagattcgggatgacggggtgatcctaagattaaagtcaacttgaaggtcaagctcggatcggagtccccggctggttgtaggttggcgttgagcgaagcgaagcccaaccgccggtgctgtggttcgttgggcttcgtcgcagggctcctcaacccaacctacgcgaggcggggtcgcagtgactagactgtcagtgtcgactcgcccaaggatttgccatgtcccatctgcatgacctgcaggagcaggggccgcttcaggccaagttgcgctacctgctggaaaccctgcaaaacaagtatcccgaggtgcagcgtctggctgtggccctgtacgaccacggcagcgactgggtcaagaccttcgtcgcggtggaggacaaggacaactccttgccctattaccacgcccagctcaaggacacgacctggctcaaggcggtggccgacagccaggcgccacgggtgatcgccgatttcagtgtgctgcaggacagccacaaggtgcatgtgcaggccctgctggaggccggctaccgctccagctacaccctgccgatgtgcgtcaacggctacttcttcggcttcgtcttcttcaatgcccgccaggtcggggtattcgacggcgcgctgctgggcgagctggacatgctcggccacctggccagcctgatcgtctacaacgagcgcgccaatgtgcgcacgctgctggccacgctgaagtcggcgatgaacatgacccatgcccgcgacccggaaaccggcaaccacctggaacgcatgtcgcgctatgcgcggctgatcgcccagggcctggccgccgaggaggggctggatgacagcttcgtcgagcacgtctacctgttcgccccgctgcatgacctgggcaagatcaccattcccgaccgagtgctgctcaaacccggccagctgaccgccgaggagcaggtgatcatgcgcgagcattcgcgcgccggtctgcagctggtcgatcagttgctggaaaacttcggcctgggtggcgtggggcaggtcagcctgctgcgcaacgtcatccttcatcaccacgagctggtcgatggcagcggctatcccgatggcctgatcggcgatgccattccgctggagtcgcgcattgtcactgtggccgacgtgttcgatgcgctgaccagtgagcgcccctacaagcaggcctggagcaacgaacaggccttcacctggatgctcgaacaggccggggtgaagttcgatcggcgctgcgtcgagagcctgctggcgcgggccgacgaggtcctgcatatccagcgctgcttttgcgaaaacgcctacggctgaggtcgccgcgccggctacgggcgcggcagattctcagagcacggcctgcttatcgatgcgcggcagcggtagtttttgcagcaggctttccggcagatcgagcagatcatcctcgctggtttccagcggtggtggctgcttttcaaagcgcgagccgagcagcagcaggcagggtgtcagcagcagtgtgaggatggtggcgaaggtcaggccgccggcaatcgcgctggacatctgcgtccaccactgggtcgagggtgcgccgatgccgaggctcgggccgagcaggtcgacgttcaccccaatgaccatcggcaccagacccagcaccgttgtcactgccgtcagcagcaccgggcgtaggcgcaggctgccgcattccagcgcggcctcgaagggcggcaggccctggcggcgcagctggttgtaggtgtcgatcaggatgatgttgttgttgaccacgatgccggccagcgcgatcaggcccatgccgaccatgacgatgccgaacgactgaccgttgaacagcaggccgagcagcacgccggcggtggacaggacgatggccgagagtaccagcaggctctggaacaggctgttgaactgggtcaccaggatcagcagcatgaggaagatggccaccaggaaggccgtgccgaggaaggtggcggcctcctgttggtcctcctgctcgccgcccagtttcatctggatgccggccggcggctcgcccgcggcggccagcagggcgggcaggcgctcgtccaggcggaagccctcggcgacatcggcctgcagggtcagggtgcgcttgccgtcgacccggcgcagggtgccgaccttgggtgccggtgccagcgtaacgaagttgcccatcggcacctggcccttggcggtggacagggtcagccggttgaactggtccagggtgcgccagctctccggcaggcgcacgcggatatccacttcgtcggtggcatcctcggggcggtaggtggccaccttgagaccattggtgaccatctgcacggcgttgcccacgctcagcacatcggcgccgaagcgcgcggcggcctcgcggtccacggtcaggcgccattcgatgccgggcagcgcacggtcatcttccacgtcggtaaaaccaccgagccgctccatttccgcgcgcagccggtcggcccagaccagggcctgggccggatcgctggcgctgatcttgaggttcaccggcttaccatccttggggccgttttcctgcttgcggaactccagcagcaggcccggcaggtcggcggtgcgctgacgcatgtcgtcgagaatgacgctggccggacggcgctgatgccagtcgatgaactggaactgcagggtgccgatcacatcctcacccaggcggttttccgtctggctgctggcaaaggagcgggcatagatggccttgagttcgggcatgccgagcaggcgtttttccacgccctgcagcagctggtccttctccaccaccgacaggtcgccacgggcgcgaaccaggacctgggcgctgtccggctcgacctcggggaagaattccacgccgtggttgagctgcgcgtaggccatatagatcaggccgatcaggccgagcatgccgaacagggtggtggccgggcggcgcagcaggctggtgagcaggcgtcggtagagttgcccgccggcgctgctgccttcctcgcgcttgggcgggttgccgccggtgaccgcgcccagcacgggcataaacaccagggccatggccagtgaggcagccagacagaggatcaccgtggccggcaggtatttcatgaactggccgaccacgccgggccagaacagcagcgggatgaacacgaccacggtggtggcggtggaggaaatcaccggccaggccatccgcgtcgccgcgttgacccaggcctggcgtggcgtctggccctggctcatataacggtcggccagttcggagacgacgatggcgccgtccaccagcatgccggccaccagaatcaggctgaacagcaccacgatgttgagggtaaagccgagcagccagatcagcagaatgccggtgaagaaggcgccgggaatggtcagcccgaccagcagggccgggcgcaggcccatggtggcgatgatcaggatcagcaccagaacgatggcagtgagaacgttattcagcaggtcgctgagcatgtcctgcacttccttggactggtccatgatgtagctgacgcgcaggccgtccggcagctgtggctgggccttgctcatcagcgccttgaccttgtcgatggtggcgatgatgttggcgccgctgcgcttggagatttccagtaccacggccggttggccgttgattcgggcgaagccgagcgggtccttgaaggtacggcggatggtggccacatcggcgaaggtcaccacgctgtcgccctgcaccttgatcggcagggacatgacgtcttccaggtcctcgatcaccccaggcaccttcatcgacaggcgcccggcgccagtgtcgagactgccggcagcaaccaggcggttgttgcgggtgacgaagttgaacaggtcgttgtagtcgatgccgtagctgtcgagcacctgtgggtcgaccagaatctccagcatgtcctcgcggtcgccgccgatctccaccgagagcacttcggggatgccctcgatgtgctccttcagctcacgcgcggtgtacaccagctgctcttcggtcagcgggccggacaggcccaccgatagtaccgggaacagcgccacgttgatctcgtgtacttccggctcgtcggcttcctcgggcagcttgctgcgggcgttgtcgaccttctcgcgcacatcggccagcgcctgcttggcgttgaagccggcgtcgaattccagggtgaccgaggcatggccttcgctggccagggaggtcatttccttgatgccttcaaggctgcgcagctcctgttccatgggccgcaccagcaggcgctcggcatcctccggggcgatgccttccaggctcatggaaacgtagatcaccgggatgctgacatccgggttggattccttgggcatcaccacataggcggacagaccgccaatgatcagaaaagccagcagcagcaggctggttcgactgcgctcgagcgcggcagcgataaaggctgccatctcagttcacctgcccggtttcacgggccacgacctgctggccggcttcgacgaagccctggccggcggtgatcagcgccacccgcttgggcaggccggcgacccaggcaacctggttactgacgctgatcagttgcacgggcgtgaattccaccacctgctgctcgttgagccacttgactcctggccgtccgtccttgtcgagactgagcagggcgggcgacacggcatgggccatggcttctccggtatcgatcagcaatgtggcgctggcgccggccagacgcaggcgctcgggattgtccaccgccacttcgatgcggaagctgcgtgtgccgggctcggcggcggcggcaatgaagtgcagggtgccatcgagctgggcgccgtcgagcagctgcacgcgcaccggctggccgatggctaggcgcgccacgtcctgctggggaatctgtgcgctgaccttgagccggccgatctcgaccacgctgagcaggctctggcccggctcgacatagtcgcccagttcgacgcggcgctcgtcatacacgccgtcgaacggcgcctggatgcgcgtacggctgagggccaggcgggtggcgtcgagccgcgcgcgggcgctggccagctcgctctcgaccttgagcagatcattgttggacagcagcttctgcccatacaggcgccgcgcggcggccgcggcggcctcctgctggcgcacatcggcctcatcacgcgccagctcggccgggcggctgtcgcccgagagggtcagcagcacgtcgccagtggtcacgctgctgcccttgtcgcggtccagcgcaaccacgctggcgttgatctgcgcgcgcagatcgactcggcgccaggcttccagctgcccctgcaccaggtgctggcgctgcatcggcttggcctcgcgccattcgaactgcacctgcgccagggcattctgagtggcgggaggctgatcggccggagcctgttcgctggccttgaaccagttgccggtgaccagccagagcagcagggcgacgctcaggacaatggccagcagccagggacgttggaagaaagcacgcagcatgatcagttcccttgcagccgtggctgagcgagcagatgggcagcctggccgtgcaggccggcgatgatgaaatcggtaatctggtcgaggtaggtgtccatggcggtatcacccagccagtcgcccaggcgaccgctggtgatgcgcagcatggcaccggagaagcaggcatccatggccgccagcagcaacagacagtcgctggccggcagggccaggttacccagcgcctggctcaccagggcgccgaagtgttcggcaaaggcggcttccatggcggcgaagcgctggcggtactcggcgctcagacgctccttgaactccgggcgttcgcagtgcatgcacagctgcgccatcagcgggtcgcggcggcagtcggacagcccctggcgaatgctctgacgcagacggtcgtcgggcttggccccggccggcagcaggcggtaaccctccaggcagcgctgggagaaatccagcaccagttcggcgaacagcgcctccttgctggggaagtgcttgtacaccgtgcccttgccgatgccggcggcggcggccacttcggcgatggtgacggtttcccagctgtgctggcgaaacagcgccagggcactgtgcagaatggcctgttcgcggtgctggaactgttgatcctgataacgcatggcgggcttcaaagaatggctgtgaccggcggtcatgctatgactgttggtcacgcgctggcaatcgccacgccggcgcgaggttgcgacaaggtgttgctgcgggtaatggcacgttgatcggcgcgtgctcgcgttgtccggatcgcccctagactgttcaagcacattcagctgctggctgtgtgcctgtttttagccgtgagatggccgcgcaggcagtcttcaatggttatgtcccatccgcttaaacgcttgatccaggcgatgcctgtaggttggcgttgggcgcagcgaagcccaacagtgggccgccggcgttgttgggcttggtcgcatcgctcctcaacccagcctgcagatagctttccgcggtggatctgttgcaacacgctgttggcacatagcctttcccatggctcgtcaaggaggtgtgcgatgaatgaagcattcaaggatcacttcgccagcgtggccgggcactacgccagcagccggccgggctacccggcggagctgtttctctggctggccgagcagtgcaacggccatgggctgtgctgggactgcgccaccggcagcggccaggcggcgctggatctggtcggttatttccgtcaggtggtcgccaccgatgccagtgtcgcgcaactggccgaggcccccgagcatccccgtatcagctttcgtcaggcgccggccgagaacagcggtctggccgacgccagtgtcgaccttgtcgtggtggcccaggccctgcactggtttgatgtgccggcctttcatgccgaggcgcggcgcgtgctcaaaccgggcgggctgattgccgagtggtgctacggcgtgcaggcgctggagggtgatgggcccaatcgcctgctgcagcatttctatcacgaggtggtggggccgtactggccggccgagcgccgccatgtggagaacggctatgccgagctggcgttgccgttcccgcccatcgaggtgccggcctttgccatgcgccagcactggaacctggcgcaactgcagggctatctgcgcagctggtcggccagcgggcgctgccacaagtccagaggggccgatccggtcgtcaccttggcgcatgagctgacaccgttgtgggggccgcctgagcagacccgcgaggtggtctggccgttgacggttcgggtcgggcgtaaggaatcctgaacgtagtgttcaataaaggcttgctttggtgaatttttaatggctaatattcatgaaattgggtttaaataatttcatggtgtgccatgttcaaacagtccgctcagcacgttgccagttactacgccgccactttccccggcagcatcccgctgcgcagcaccctgcaggaaaccctgcaggccgatgtgctgatcatcggcggtggcttcagcggcctgcacacggcgctgcgtctgactgccgccggcaagaaggtagtcgtgctggaagccagccgtctggcctgggctgcgtccgggcgcaatggtggccaggcgctgctgggctggtcgtgcgatatgccgccgctggagaaggcgctcggcgtggcctgcacccggcgcctgtgggccagcatggtctgggccgccgaggaaatccgccagctgccgcagcgccatggcttcgacatcgactaccgtccgggcagcctgtggacggcggtgctgccgcgccgcgtcggcatgctcgccgaggcgctggaagaggcgcagcacaaatggggctatgaccagctgcgcctgatcggtcgcgatgagctgcccgagtggatcggcagcgagcgttaccaggccgcgctgtacgacccgcaggccggccacctcaatccgctcaagctggcccagggcctggcggcggccatcgagcagggtggcggccggttgttcgaacagagccgtgtgctcagctacggcgagcagggcgaaggctatgtggcccgtaccgagcggggcgaagtccgcgccgaccagatcgtcctggcctgcaacgcctacatcgaccgcctcgacagccgcctgtccagccgcctgctgccggtgggctcctatcaggtggctaccgcgccgctcgacccgcagcttgcggcgtcgctgctgccgaagaacagctgcgtgatcgacaaccagttcgtccccgactatttccgcctgaccccggatcaccgcttgctgttcggcggcggctgcacctacctgggcggcatcccggcggatgtggctggtgccacccggccctatctggagcgggtgttcccgcagctggccggcgtgaccatcgattacgcctggggcgggcacatcgacgtgagcatgaagcgcaccccggatgtcgggcgcgagggcggccgctactggctgcagggtttttccgggcatggcgtgctgccgaccctggccgcggccaaggcgatcagcgatgccatcctcggtgatacggaactgctggatctgtaccagggcctcgacaatccgcgtttccccggcggcagcctgctggccgccccgctggaagccgccggcaaggcctggtaccggctgcgcgatttcttttaatgatccggcccacggttgggccggtgctggagacacactatggatatgcaggatgaagtcgaaggtctggcgatcctgattcgcgacctgcgcaagcacaagggtgtgacccttaacgagctggccgagcaaatcggccgttcggtggggttcctgtcccaggtcgagcgcggcaagtcacggccgaccgtggccgatctcaccgccatcagcgagacgctgggcgtgccgaccacctatttctacaacctgagcaaaccccgcgaagtgcgctgggtgacccgcccgggcgagcgtcgcacgctctattacgccggcggcatcaccgacgtgctggtctcgccgaccatgagcggcggcttctccatgctcgaaagccacctggcgccgggcgccagcagtggcgacaaacatgtcaacgacagctcggagcagggcggtttcgtcctcgaaggcgaactgtcgatctggctgaacgaggcggtcgagccggtggtgctgtacgccaacgacagtttccagctgccgccctttgcccagttccgttacgccaaccagagcgagcagcctacccgtgtgctctgggtattcacttaaatacgcctgttacagacccgtaggaccataacaatgacaaccgccaccaccttccccgatctgcttagcgaagtccgcgccttccgcgcggccaacccggaagttcgctatgtcgacctgatctgcctggatatccccgggcatttctacggcaagcgctacccgctggacatgctggagaaggtcgccgccggcagcccgctcaagctgccgcagaactgcgtgctgctcggcgttcagggcggcctgtacccgatcggcgattactgcttccacgacggcgacccggatgcgccgcgccgcctggtgcccggcactctcaagccggtgcgctgggaaggccagccgctggggcagatgctgatcacctccgacggcaccgaggcacccatcgagttcgagccgcgcgaagtgctggcccaggtgctcaatcgtctggaaaaacgcggcatccgtccggtggtggctttcgagctggagttctacctgttcgaccgcaagctcgacgccggcctgccgcagttcccgcgtgatccgctgaccgatgacgaagacgatcagccgaacatgcacatcgagcgcctgtcgcgcttctccggcgtgctgcacgagatcgtcgaggctgcccgcgagcagggcgtggatgccaacgtgatcaccgccgaactcggccccggccagttcgagatcaacttcgcccacaaccgtgatccgctgcaggcggccgactggtcggcgctgttctgccgcagcacccgcggcgtggccatgcagcacggctaccgcgccagcttcatgagcaagccgtacctggacgcgccgggcagcggcatgcatgtgcacgtcagcctctacgacaaggacggcaacaacatcctcgacgccgaccagcagcgtccgctgcgccatgccgtggccggctgcctggagctgctgccgcgctgcatgccgatctttgccgccaaccacaatgccttccgccgctacggcgccatggtcaatgccgcgagcaaggccagctggggcttcgaagaccgcgatgcgtgcatccgcatccccgagtccgatggcaagaacctgcgcatcgaacaccgcctggccggtgccgacgccaacccctatctggtgctggcggccattctctcgggcatggaacacggcctggatgcccaggtcgagccgatcgcttcgctcaacgaagaccgttccagcggcatcgacttccccaaggacatgctcaccgccgtggctgcgatggagtcccatccggtggtcaagggcaagctaggcagcgagttcgtctacgtctattgcgagaacaagcgccaggatcatctggccttcatgcacgacatcagcgcccgcgagtaccgctggttcctctgatacccgaccggcgcccgcctgcgggcgggtgccggacgcaaggagtggtcatgtatatcggtgaactggcgaggcgcagcggcgccacgcccaaggccatccgtttgtatgagcagttgggtctgctggggcagattgcccgcgagggcagctaccgcgtgtacgacgcagcacagctgcagcaggtgcagctgatccgccaggcccagcgcctgggtttcagcctggccgaactggcgcaggcgctgggcagcgacccggcgcagccggactggcgcacgctgctcgaccgcatcgaagccaagcgccatcaggtgctggcggagatcgcccggctgcgtcagctggagcatgaactgggtgtggtcggcgaggaaattgccggttgcctgcacggccagccggcctgcgaaatcgacggcgcttgactctgcccctaggggcagaccctagcctgtaccgccacctgccaggagacggtcatgggcaaacgcattctgctgattcagggccacccggcgccggacagtttctgtcaggcgctggccagccgatatgccagtgccgcactggcggcggggcatgagctgcgcgagctgacgctggcgcggctcgctttcgatccgctgctgcatcaggggtatcgcggcgaacagccgttggagccggacctgctcgccgcccaggcggacatcctctgggccgagcatctggtgttcgtctacccgatctggtggggcagtgtgccggcgttgctcaagggctttctcgaccgtgtgctgctgccgggctttgccttccgctatcacaagggcaaggcctttcccgatggcctgcttaaaggccgcagcgccgacctgctggtgagcatggataccccgccgtggttcttccgctggttctaccgtcagccgggtatctggcagatgaagaccaccaccctggagttctgcggcgtcaaaccggtgcgggtactgcgctgcgggccgctgatcggctcgacacctgtccggcgtgagcgctggctggcacaggctgcagcacgtgccagtaaacgctagcaaaacagtctgcgccgcctgatctcagcctcaataggccggtagggttccgccatgaatggcgccctgtggtgggatgacaagagttggcaggcatgcgctgggtgaatcctgacctgctggcgggtatcctgttgagccttttctcaatgctcaggtgtctgcatgcaaaaccagctcgttgaactgctcggcctgatcagctccggctgcatgactgacgaggatattcagcgcgttgctgctgaagccgctgcggcttatgccgatccgcaagctttcctgcaggccaacccggatatcaattacgacgataccttcccgattccgctgggggagtgggtagtggtcggtagtctgccggataccgtgctgtttcaggctgatagctaccaggagttgtttcagcagatcgtcgattcctttggccccagtgtcagcttcgtactcaaggccaaacagctggctaagaccgagcctctgaccgcgctcaagcgtattcagacgcagctctcggcgttgtatccagagaaaaaaggctatgtgctgatggagttcagcgagccgctcgacgatgagttgcaggcggtgctggtctacagctgcgacgtgccgcgagtgatggcgctggcggtggaagtcggtatctatgccgcgccagcttacgagagtctgctggcagccagcgaggaagcgggggactgaggggggcgcaggggatcgagcagtggcttgagaccgttgtgatcgatttcctgcatcagcatcagcaggcgaccaatttcgcctttggggaagcctgtgcgggcaaaccagttgaggtaatggccgggcaggtcggcaatcaggcggccttcgtatttgccaaagggcatgcgccgggttaccagcaggagaagatcttcgggattcatcagcaggaaaactgtccgggcggtgggctgccagtctggcacgcccgaacagttttttgaatgcagcctgcgcaggcggcaggctggcgggttcaggctcagatacccagcttgtcacacaggctgtagtaccaggcacccatggcggtgaagggtacgcggaacagacgaccacccgggaacgggtagtgcggcaggctgccgaaggcatcgaagcgctcggcctgaccgcgcagggcctcggcgaggatcttgccggccaggtgggtgtaggtcacgccgtgaccgctgcagccctgggagtagtagatgttgtcgccgatgcggccgacctggggcaggcgcgacagggtcagcaggaagttgccggtccaggcgaaatcgatcttcacatctttgagctgcgggaaggtcttgagcatcatcgggcggatcattgcctcgatgttggccgggtccttggcgccgtagaccacgccgccgccgtagatcaggcgacggtcgccagtcaggcggaagtagtccagcaggtagttgcagtcttccacacagtagtcattgggcagcaggctcttggccacttcttcgctcagtggctcggtggcgactacctggctgccgcacggcatggtcttggcggccagttccggcaccaggttgccgagataggcgttgccggcgaccacgatgaacttggccttcacgcggccctgcggggtgtgcacaaccgggttagcgccgcgctcgatacgcaccgccgggctctgttcataaatgatgccacccaggctctccaccgctgcggcttcgccgagggcgaggttcagcgggtgaatgtggccgccactcatatcgagcatgccgccgatgtagttttcggtcttgaccacctcacggatgcgcttggcgtccatgatttccagctgggtgtggccgtagcgctcccacagttgcttctgcgcttcgaggtgcttcatctgcttcttggtgaatgcagcgaagacgccgccatccttcaggtcgcacttgatgtcgtacttggcgatgcgctcgcggatgatgcggccgccttcgaaggccatctgacccatcagttgggcttgtttcgggccgacagtacgctcgattacgtcgatgtcacggctatagctgttgacgatctggccgccgttgcggcctgacgcgccgaaaccgaccttagccgcttcgacgatggagaccttgaagccgttctccagcaggaaaagtgcagtggagagtccggtataaccggcgccaatcacgcagacatcggtttccacttcgcccgccagagccgggcgctctggcaccggattagcggagaaagcgtaataagagctgggataaggagtgtgcgcca

SEQ ID NO: 85 - DNA, 3066 bp, Unknown
  From metagenomic library of CO182
atgaatggcttcgccaacgtgcagccatatatgtgggaggctttacgcatgctggagcgcggcatagtcgatccgcagaattacttttctcacactttcgccctgagtgacgtggataaagccttcgccacattcaataacaaatctgatagtgcaatgaaaatgctcatcaagccgtaatacaaataacaaccacctaaaaaaataataaagtaaggtatatgctaatgaaaaaattccgtacgatttcagctgtaatcctcgctatcagttcacccatagttcaggccaccgaagttttccgattggagggcttcggagcaatctcccgtgccatgggcggaaccgcaacagcattcgatgttggcgcagcgggcatgatgagcaatcccgcaacactgtcgttaatggcccaaggttcagagcttcatttgggtctggatgcagtggttactgacatcgacacaaaaaatctggccacaggagaaaatgcgtcgtccaatacacactccaagaaccgcggcccctatctagcaccccaacttgcttatacttatcacagtggcccccttgcactcggcgtcggtgcctttgcccaaggtggactgggaacggaatatggcaccaacagctttctttcccgtgccacaggaaacttggatacggggctcgaaaactcgagccggctcctcgtcttgaacatccccttcgccgccagttaccaagtcaacgataaactgactgtaggtgccagccttgatgccatgtggcaaggcttgaatctcgaactattactcggtgcagatcaggttggctcgctgatcggcgcgggcagggtcagcggcagccttgtacctgtacttggtggtttacccgatttacgtggtgcgcacttcagcttgagcaaaaaccaaccccttaacagtggtgttgacgcttggggtttgggagggcgtctcgggatgacctacaaagtgtctaataacaccattctgggggccgcttacaccctggaaagccagatgaatgatatgcaaggacgggctacgcttaccgcggttgatggaatcgctggccagatccctctcgatggaaagatcaagttacgtgacttccagatgcccgccaaactagactttggccttagtcatagtttcaacgagcagtggatgtttacggtcgatgtctctcgcgtattctggaagcacgcaatgaaagatatcaatgttggattcacgtcagacaacggagttaacatagacattctgctcccgcaaaactacaaggatcagaacatctttgccattggcctggcctaccaaacaggtaactggacattgcgcagcggtgcgcgtatctctgatcaagcactacgtgccgacacactgtttgctatcattcccgccattccaagaaaacacgtttcggctggtttttcctatgatttttcgagtgcgaatagtgtggattttgcctattcccatgcatttaaagaatcgcttgaaaactcatctctgcccaatacgtcagcccccatacgcagcagccactcacaggacaattttacactagcttatactcacaaattctgattacagtcgcttattttttgggcgaggagaatattcctcgcctttttatggctaccgaatcaatcgcgctactcatacacacctggtaaatctgaaaaatttcgctttgagtaagccttcatcatgacaattagctgtttaaccttaggacttattgtttctgccttcgccttaggctggatcatttcgcgggtgttgacgaaacagctacccttagcgcccacaactggtatcaacccgacaaacctggaaatacattttcagcatattgaaggtacaagtattcgtttaaccaccgaatccgcaacccttgtttcacgcttctcaccctttctgcaagcggaaaaagaagttgcagaaaaaacccgtaacctggccgaacgacggtctcaattaattacccatgttgtgtcatctctggatacaacgggtttgctcgtattggaaatgggagcggctgctaagttagttgatataggaggtaagcaagccagctcattggacgaaaaggtcgaggcgctattggctacattggctcgagtaggagacgagtttaatggagttgcacaagctacccagcacataagcgaaatagttacaacaatcgacgaaattgctgcgcaaaccaatctgcttgccctgaatgctgccattgaggctgcacgggcaggcgagatgggccgcggattcgcagtggtagccgatgaagtacgcaaattagcccaccgtacgactgaggccacgggacgtatccgtgagatcaccctcagcgtccgaacgcgaacagattcagcaggtcatgcaatacaagatgcgcaagagaaagctcttgccggacgacaagcatcggcagaaaccgtcgaggctatacagaaaatcgaagagagtgccacccgagtcttgcaactgacgacaatccttgatctgtcaggcaagaaaacggaagaagtggctaacaccctggcccatgaggtcgactcggtagctttacttaccgagcacctgtccgatacggcgactgagtgcaataaaatattgcgtggagtggctgcacacatcattgaactcaagcaacagcttgtacacatagcaccaactcgccatcccctaacatctatactcgacgcagttgaggagatgcgtaccatcaatctgctactcatgagttcgacccagaacgatgaggcaattccctttatcaaacgcgcccacgaaattgatgaggcgctgcttaggcgaatgcaagagtggcggagctatgacggattctcggatgtttctgtcactgctgctcagacacttgacgcctgcctgcagcaatatcgaagggctcgagatgaggttctggcggcagcgaaacgagaagatttctcaggagtccgcaatttggtgtcgcaaaaagctcgccccgcctatcaagcactcaaaacagagctggtcgacttgatgaaactcataggaataacaatgacct

SEQ ID NO: 86 - DNA, 24591 bp, Unknown
  From metagenomic library of CO182
atgagcttcactcccaagccgtgtaacggcctgccctgtgctattgccaccccacgtctgcctcgtgccaccctcgccctgcttctgctgcccgtgttgctggccggctgcgaggccgaactgaacctggcggcggtcggcgaggcgaccagtcacgccagcctgcgcaccgaccattaccaggccttggccagcaccgcggcagtcagcgtgctggtcggcaacgatggcgtggtcttggtcagccaggaccagggcctgacctggcagcgccagcaactgccgggacagcccggcctgatcgatgtggatgcctgcccggacggcagtttcatcgccctcggcttcgccaaccagctgtggcacagcgccgatcagggcctgagctggaacgcccatgcactgccgacccaggagcagatgctcaccgcgacctgcgcccccaacggcgcctggtggaccgccggcggcttcaccaccctgctcagtagccaggaccagggcgccaactgggacgaaaccagcctggacgaagacgccatgctcaccagcctgcagttcctcgacgcgcagcaggcggtggtcaccggcgagttcggcctgctcttcagcagtcgcgacggcggccagagctggcaggccagcggccgcctgccggaggagttctacccgcacgccagccgcttcgtcagcctggatgaaggctgggtcggcggcctcaatggcttcatctaccacaccgtcgacgccggccagagctggcagcgccaggacacccccactgccgcaccgatcttcaacttcagcgccaaccgcgacggcctgttcgccatcggcgaccacagcagcgtgctgcgtctgagcggcgagcgctggcgggcattgcccacgccaaatgcgccgacttacctgcgcgccgtcggcagcggcgacgaccatcgtctgaccgtggccggcggccgcggcctgttgctcaacctcgatacccgcccggccctggccgcccaggctcagtgaggctatgaccatgtccatgcaccgcttcacccatttcttctacctggccaaactctggctgttccgtaacccgcgccgggtgctggcgctgatcggcgcgctgaccctgttcttcgccgcccagattccggcgctcaaggtctataccgacttcgccgacctgctgccgcagcagcacccgtatatccagctgcacaacagcatcaaggacaccttcggcggcgccaacgtgctggtgatcggcgtcgagttcgaggacggcgacctgttcagcaacgccaacctggccaccctcgaccgcgttacccaggcggtggacaacctgccgggggtcaaccacaacctggtcagcagcctgacccatcgcaactcgcgcaagatctggctgaccgaggtgggttcgatcaactccgagccgtattaccagagcgaattcggtccgatgagcgacgagcagctggcggcgatgaaggccgacgtgctggccaacccgcgcgtatacggcccgctggtgtcgccagacctgaaggtcgcgctggtcaaggcgcagctgatcgaaggccagctcgactacgaggccaccttcgcccagctgcaggcgctgcgccagagcgaggctcgcgaaggcgtgaggatctacgccaccggccagccggtgctggtcggctgggcctacacctacatggaccagatcctgcagatcttcctgttcaccgtgctggccatgctggcgctgctggtgttccacttccgcaaggcctacggcgtgctgatccccctgggcggggtgatgatctcgaccatatggggcctgggcatcatcagtctgctgggctacaacctcgatccgctgggcctggtgattccattcctgatcgccgcccgcgccatgagtcacggcgtgcagctggtggaacgctactacgccgaagtgcgcgtgctaggtgatggaccgctcgcggcgcgtgccaccttcgatagcctgtttcggcccggcacgctgggtatcgcctccgatgcggtggggctggcgctgatcgccatcggctcgatcgccctgaacaccaagctgggtatctacgcctcgctgtgggcgaccaccgtgatcttctcggtgctgatcggcgtgccgctgttgctgtcgatcctgccgaccccgaaggacacggaaatcaaggaaacctttctgcgccacgtcggcggcatctgcgccgcgaccgctgcgcgtcccggtgcggccggcaagctgctgatcttcgctgcgctggcgattctggccgggctctgggcctcgtcgaaggtcaccatcggtgattccgaaccgggctcaccgattctctatccggagcatgactacaacctgtcttccaagcagatcaacgggcgtttccccggttccgaggagctgtacatcattgccgagcacgccgaaaagggcggcatcaaacgccccgaggtgctgaaggctctacagtcgctgcaggcgcacatgcttaccgacccctccgtcggtggcagcaagggcttgccggacctgatcaaacaggtcaaccggctgatgcacaacgacgatccgcgctggtttcaggtgccgcacgatgccgattacgtcggcggcctgatgttcacctatatggcctccagtccaattcccggcgcgctcaacgaattcaacgacaccgacgaccgcatcgccaacctggtcttctactacaaggatcgccagggcgagaccatccgccgcgccatgcacatggccaagcaatggatcgccgagcacggcgaggaggtgccgggcctgagtatccgtctggccggaggcaccctcggcgttgccgcggcgatgaacgagtccgccttcgacaccaacctgctggtgctgccgctggtgtttctgctgatcttcgccttcgtcatgctgttctacaccagctggcacgccgggctgatgatgctgatggcaatgctcttcgccacggtgcttacctacgcctacatgggtctggccgggatgagcatcgacatcaatacggtgccggtgatcgccgtcggcattggcgtgggtatcgactactcgatctacatgatggaccgcatccgcgaggagatggtcaagagcggcaacctcgccgccgccgtgcaccgcgccattgccaccaccggcatggccgtcagcttcaccgccatgaccctgatggccggcatcgtcatgtgggtgctgctttccgacctgcgcttccaggccgatgccgcactgctgctgtgcgtgatgatcgttctcaatggctttacctcaatgctgctggtgcccgcctgggtgctggtgttcaagccgcgcttcatcaccgatgcctatgcagacgaggacgggatcattcacgccgaccacgatctgcccgctgaacccctgccggcgacccagcgggtcgagggtgggctgtcacagggggcggcgcacccggcctgaggcctggtgcgttgctcccaaccatgattgcaagaggatctgccatgcagaaaacaacaagaaaaaacctgcgcaacctgggaatcgccatgcttggcggtaccggcgtggccctgatacccctggccagtgcattggctgaggaagagacgcgctataccggcttctacgaaaacgcgacccatgtgcgcgactcggtgggcctgtcgaaatttcgcaacaccgtgcaggtcaatgccgaccgcgccctggaagaccgcggacgatttcgcaacatcaagttccacggcacctttcgtggcagctatgacggcgtctatgacctgaactccagcgagtacggcagcggggcgggggggccgatcatgctggaaagcaccatggcgggcaccagcgtgccgcatggtggcggtatcaagctgccgaataccttcgacctggcgcgcaaccccaacgaaggcatgatcgtgctcggcgaaaacctgcacaagacgcgcggcggcgtggccttcggcgttccggtgcgcccctgcgacaaggacagccgcggctgtatcgatgactatctggacgccagtagcaatgacctgcggtttcccgagttcaacgagcggctggacttcatccgcgaactgtacatggacttcgaccacggcctgcccaatggcgacatggtcagctggcgcctcggcaagcagcaggtgatatggggacgcaccgacctgttccgtgtgctcgatgtgatcaacccggtcgacttctcgcgcaacaacatctacgacgagcttgaggacatccgcatcccaatgtggatcgccaaggccgactggcggatgggcgccggtgaggtgttcgatgatctcaacctgtcgttcgtctggaacttcgacaagttccgcccgcacaacctcggtcagtgcggtacgcccaactcgatcctcgatgcggcgtgcttcttccgcggcatgaacaacctctgggagaacggcggcaccgtggccaacttcgccggcgccagcccggctggcggcctggctaccgactttggtcccgggcagatcggtatccgcaaggcgcatatgccatcgtggagcctgtccaacacccagttcggcatcaagctggaaggcgtctacggtgaccttggcttcagcctcaatgcgttgacttatcgctcgcagctgccgtccctgcgtggcggtgtgcctgggcagaatgggttcaccggcgaggttgcgccctggccaagcctgattgccttcgatatccacttcccgcgggtcaatctggttggcggttcggtggattactactcgcaggccatcgacacggtgttccgcttcgaggtcgcgcatacctccggtgaggagttcgccaacaccatgcagtcgcggctgttctcggagtccgacgtgactcgctatgtgatcggtgccgacaagaacatcttcattcccttcctcaatccggggcgcgccttcctcttctccggccagctgttcggccagcacatccacgagcaccaggaagagcgtcgtcagtggggcaaggccggcatgccggactgggagcagaactggatcggcaccctgctggtgaaaggctggtggatgaacgaccggctcagcccgcagctactcgccgcgcatgacttcaaggccaaggccaccgcgatcgcgccgagcatcgagtacctgttcaacgacaacctgcggatcatcgccggcgccaacgtcaaggtcggtcgcggtgcccgcgagtatgacgattgccgcagctgcaacccttgggatccctacaccagtgccggccagccgtccgggtacagcctgggcctgggtggctatgagccgctcggccgcttccgtgctggccccattggcatggcgcagaaggaagacgaactccagctcaccctgcgttacagcttctgatcacgaggaatgaacttcatgaacaacaatatcttccgtctgagtgcgctgagcctggcgctggtcgccggtgccgccagcgcggacgtggtcgagaactcgttccagccctacgcgcagagcaagccgagcttcaacggcctgagcgtcggcatgaccatcgacaagtccaatgttgcgcaattcaaggaggtcatcgatccggccttcttcagcttcatcgagaagggctgggccgagctgaaggtcggcgaaaccacctctttcgatctcaaccccaagtatgtcgaggccactcgcaacggcctcgacaaggtcaaattgggcgccaagcctggccagatcgaaggctgggctgccggccggccgttcccgcaggagccggacgccaacgatccgcgtgccggcgagaagctcgcctggaattacaagtacggttacaactggggcgacagcgcggcgatctacccgttctactggaaatatcgcgacatgaactcggccaaggtcgagcgcaccatcaagttcaacttccacttcctcaacttcaccggccgcgtcattcaggagccgaccccggcgatcacgccgaacccgtcgcagctgttccgcggtatctacgtcaacgtgctggagccgcatgacgtgcgcaacacacaactcctgatccaccgtgccgaggacgacctcaagcgcgacaactcctggctctatctgggcttccagcgccgcgtgcgtcgcctggccaccgggcaggtgaccgacgccttccttggttccgatctgatgatcgaggacttcgagggctacaacgggcgcatctccgacatgaagtggacctacaagggcacccgtttcatgctgatgccgttctacaaccacaacgagctggcgctagacaacgaaacccacaaggacaacgacggctacaaggtggtggcgttcggtggtcagggcggctgcttccccaacatcacctggcagctgcgcaaggtctacgaggtggaagccgcaccggtggatgccagccacccactgtccaagcgcgtgcatttcatggatgcacagaccttcaccgtgccgcgtaccgtgtcgtacgaccgcaagggcgcgatgtggaagaccttcaccattggccaggcgcatccggatcatcacctgccggtgaacaagggctccggcgtgtcgatcgacgacagcttcagcatgatcgacgtgcaggccatgcactgcaccaccggccagttcaagggaatcgtcgatcccaagctgagcccgccggaaatgttcagcgtgcagcatatgcgcgccaccggtaactgaccggccatgccgcccggtcttctaccgggcggctaacttccctacccgacgtgctggcgacgaccgccggtgcgccggtgcctgcaggaaaccaaatcatgcagaacaaccagaacgcatcggatctgttgcgcgaacagctcgttctgttgagcgataccaagggcaatattctctatgccagcccggccctgtgccggcatctcggcacgccggccgcgtcgcttgaggggcagccggcttccgtgctgcgccacccggacatgccagcagggccgatcaaggatctgtggggcacgcttggccggggccagccgtggatgggcatgatgaagaaccgtaccagcgatggacggacgttctgggtggatgcgttcatcagtccggtgctggataacggcgtagtcagcgaatatcaggcgatctaccggttgcccgaggctgattcgatcaaacgtgcagaaaatatttaccgcattcgcagccagggtcggcaacccgcagccctgcgttggcgctggttcgaccggacgctggcgcaggtgctgttggcgaccctcgccttcgccccgatcggcctgctcgcgctcagccttgcgcctttaccggcgctggcgctgctgctcgccggtgtggcttgttgctggctgctgctgcgcttgcacgcgcggccatttgcccggctggtagcgcagagccgaacgctggtcgagcatccgatcaagcaactgatctataccggacggatcgacgaggtcggccagctgcagctgggcaatcgactgctcgaggcgcgcctggcctccatggtggctaggatcggcgacagcagcggccgcgttgccagccatgccgaacgcacccgcgagctagttggcagcggcaaccgggcggccgaacagcagcagctggcgctcgatgcaatcagcgcggcggtggaagagttgggtgccaccatccgtgaagtggccggcaacaccgggcatgccgccgaactgacccgccacgcgcaaacgctcagcctcgaaggacagaatcgcgtaactgctgcgcatcagcgcatcggtgctctggccgggacgttggaccattcggccgaggcggtcagcgtgctgagccagcatagtcaggccatcggcggcattctcgaggtgattcgtggcattgccgagcagaccaacctgctggccctgaacgcggcaatcgaagcggcacgggccggtgataacggccgcgggtttgccgtggtcgccgatgaggtgcgctcgctggcgcgccgcacccaagcctcgactgacgagatccagcagatgattgaggcgttgcgtcatggcactacggaggtggtcgatcgcatgcagcaggggctcgaacagtcgcgggccagtgtggagcaggtcgacgcaacggcgcgggcgctcgccgatatcgcccgtcatgtcgccgatatcgccgacgtaagcagccagattgccgaggctggaacgcaacagggactcgcggccgaagagatcaaccagaagctctgtgccttacaggagctcgcccggcacagtctgcagatgcagcaagacaccttcggcgtggccgacgaggtcagtcgccaggccggtcggcagcaggcgttgcttgcgcagatgaactaaggaacgttacgcctggcgtaacgtttgcactaccagcttgattgatgacccttcggtcacgtccctactgtgcgctccacaagcggaaaaactgtggagtcgccatgacaacaacaatctccccaccgccgcagtggtcgcgtcgtcgcgctgaaaaagcccgtcgtctcgatcaggtgcgcagcctcgctgatggcgtggtgctgcccagcgagcggatcgtcgaggccctggaactcttgatcgcccccggcgaccgggtggtgctcgagggcaacaaccagaagcaggcggacttcctctcccgctcgctggccaaggccgaccccggcaagctgcatgacctgcacatgatcatgccgagcgtcagtcgcgccgagcatctggatctgttcgagcggcagatcgcccgcaaactggacttctccttcgctggcccgcagagcctgcgcatcagccagctgctcgaagacggcctgctggaagtcggcgccatccacacctacatcgaactctattcgcgcctgttggtggacctgatccccaacgtcgcgctggtggccggcttccaggccgaccgccacggcaacatctacaccggccccagcaccgaagacacgccggcgctggtcgagccgatcgcgttcagcgacggcatcgtgatcttccaggtcaacgagatcgtcgacgagctgccgcgcgtggacatcccggccagctgggtggatttcgtcgtggtcgccgacaagccgttctatatcgagccgctgttcacccgcgacccgcgccacatcaagccggtgcacgtgctgatggcgatgatggcgatccgcggtatctacgagaaacacaacgtgcagtcgctcaaccacggcatcggtttcaacaccgccgccatcgagctgatcctgccgacctacggcgaatctctcggcctgaaaggcaagatctgccgcaactggacgctcaacccgcacccgacgctgatcccggcgattgagaccggctgggtcgagagcgtgcattgcttcggcaccgagctgggcatggagaactacatcgctcagcgcccggacgtgttcttcaccggccgcgacggctcgatgcgttcgaaccgcatgatgtgccagctggccgggcaatacgcggtggacctgtttatcggcgccaccctgcaagtcgatggcgacgggcattcctccaccgtcacccgcggtcgtctggcgggcttcggcggtgcgccaaacatgggccacgacccgcgcggtcgccgccatccgaccccggcctggctggatatggccatgcccggcggcgaggccccggtgaccatgctcgagcgcggcaagaagctcgtggtgcagatggtcgagaccttccaggaaggcggcaaacccaccttcgtcgagcagctcgatgcggtcgaagtggcgaagaagagcggcatgccgctggcgccgatcatgatctacggcgacgacgtcacgcacctgctcaccgaggaaggcatcgcctacctgtacaaggcgcgctcgctggaagagcgccaggcgatgatcgccgcggtggccggcgttaccagcatcggcctgcggcacaacccgaaggacaccgagcgcatgcgccgcgaagggctgatcgcgctgccggaagaccttggcatccgccgcaatgacgcgtctcgtgaattgcttgctgccaagagcatcgccgaactggtcgactggtccggcggcctctacaacccgcctgccaagttcaggagctggtgatgagcgcactcattgcaagacaggcgcagccgacactggccgagcgcctggcggatctggcggtgcaggcgctgatcgacgaagccgatctgtcgcccaagccggggctggtcgaccggcgtggcaacggcgcgcatcaggatctgcacctagggctgatgcacgcttcggcgcatgcactgtggccggcgttcaacgcgatggccgaagcggcgcaggcgattggcgaagtcggtcagcccttgcgcgaaaccctcggcgagctgggccgcgacggagaagccgagatgctccgcgttaccggcggcgtgaacacccatcgcggcgcgatctgggcgctggggctgctcagcgcggcggcgatgctggaaagcggcgcttcggctggcgggatcgcctccagtgcggccgccctggcgcggctgaacgatccggctgcgccgcacaatccggacagccacggcgcgcgggtctgccgtcgctacggcgtactcggcgcccgcgaacaggcccaatacggctttcccgcggtcatcgagcacggcttgccgcagctcctggccagtcgctgtgccggcgccggggagcagaacgccaggctcgatgcgctgctggcgatcatgagcagcctgagcgacacctgcgtgctgcaccgcgccggtctcgaagggctgacccgcatgcaggccggtgcccgcgccgtgctcgaagccggtggcgcggcgagtctcgccggtcgccgccagctgcgcctgctcgaccgcgacatgctcgccctcaacgcctcgccgggcggcgccgccgacctgctggccgccacccttttcctcgactgcctggcgcctgccgcgccagcgccgactgggagcaactgaacatggaaaccctgtctttcgaattcgccgccgggcaacccgcccgcggcaaggccctggtcggcgtagtcggctcgggcgatctggaagtgctgctggagcccggccaggccggcaagctggcgatccaggtagtcacctcggtcaatggtgccgagcaacgctggaagagcctgttcgagcggatgttccgtgagcagaacctgccggcactgaacatcgatattcacgattttggggccacgcccggcgtagtgcgtctgcgcctggagcagggactggaggaggtcggccatgactgatgtgtccgctaacaccgtggcccgtttactcgagtcgcgcagcttcgtcgagctcggtgcgcgccagcgcgcccgcgcactgctggataacggcagcttccgcgaactgctcgatccgttcgaccgcgtcacctcgccctggctgccgaagcagggcatcgtcacccaggccgacgacggcgtggtggtggccaagggcagcattgacggccagccggcggtgatcgccgccatcgaaggcgccttccagggcggcagcatgggcgaggtcggcggcgcgaagatcgccggcgcgctggaactggctgccgaagacaaccgcaacggcatcccgacccgtgccgtactgttgttggaaaccggcggcgtgcgtctgcaggaagccaacctcggcctggcggccatcgccgagatccaggccgccattgtcgagctgcgcgagtaccagccggtgatcggcgtggtcgccggttcggtcggctgctttggcggcatgtcgattgccgccgggctgtgcagctacctggtcgttacccgtgaggcccgcgtcggtctcaacggcccgcaggtgatcgagcaggaagccggcctcgacgagtacgactcccgcgaccgcccgttcatctggagcctgaccggtggcgagcagcgctacgcctcgggtctggtggacgcctatgtcgccgacgacaccgacgccatccgtgcgcaactgcacgaactgttcgccctcggcaagccggtgcaaccgcgcagccgccgccacgcctggttcctccagcgcctggccgacgtcgacacccgcacgcagctcgatgctgccgccgtgcgtgccctctacgaaggagatgcccaatgaaccgtggactgaactggttgcaagccttggccggcggtcaggcgcaggccggctatccggcctcggtgaaggtggtcgacggcacgctcggtgagcgcaccgcccgctatatcgccgtggtgccggatgccgagaatcccttcccgcgtgcccgcaacggcgaagtcggtctgctcgaaggctgggcgttgggccaggcgctggacgaggtgatcgccgccgatcgcgacagggccgacaggcgtgtgctggtcgcggtggtcgatgtgccgagccaggcctacggccgtcgtgaagaagcgctgggcattcatcaggcgctggccggtgcggtggacggctatgcccgtgcgcggctggccgggcatccggtgatcgcactgttggtgggcaaggccatgtccggcgcctttctcgcccacggctatcaggcccagcggatcatcgccctgcgcgatccgggcgtgatggtgcacgccatgggcaaggccgcagcggcgcgcatcaccctgcgcagcgtcgaggagctggaagccctggccgaatcggtgccgcccatggcctacgacatcgacaactacgcgaccctcggcctgctctgggaaaccctcgccgtggacagcatcgagcagcccgcggcggccgacctgcagcgtgtgcgtgactgcctgaacaaggccgtcgcggacatcggcagcagcagcgacctgcgcggccgcctcggcgcgccgaatcgcgaagcgtcgtcgcgggtgcgcgagctgttgcgcgcgcagtggtagcggacacctgaagcgggcgtatccgccgaacccgtcagcgactcgacaacaacaatcacaaggaggctgtagatgcacgacactccacgcccccacgacctgctctggggcatgcgtcccgagcagctgccggccgatgcgcccgcctgggcggtcgctgtgctcgccgctggccagccagtggtggtgcggcgtgccgtcgtcgcgccagggcaggtggcggtcggcctgcgcggggccacgcgagaccagcgcctggccgcgctgatgccggtcgaggcgatcagccatcggctgacaccggagcagctgctcgatcgtcgcgccagcgaagacctgccggtgttccgcgggctcgccgaactgcgccccttgctcgatgccctcggccatgcctggggtgtcaccggctcggccggcttccagctcgccaccggcttgtcggcggcgcacccggacagcgatctggatctgctgctcagagccgagcgcccgctgccacgcagcgaggcgcgcccgctgttgcagctgctcgaacgccgcgcctgccgcgtcgacctgcagctggaaaccccgctcggtggtgtggcgctcagggaatgggccggtgacgccatgcgggtgctggtcaagaccgccggcgggccgcgcctggtaaccgatccttgggccgcggagcgtgcggcatgagcagcctgttcgcctttcccggccagggcgcgcagaagcccgggatgttgcagcgtctgcccgagtcgccggaagtcgccgcgaccctggccgaggccagtgcggtgctcggcgaggatgcgctgctgctcgactcggccgaggcgttgcaatcgacccgtgccgtgcagctctgcctgctgatcgccggggtcgccggggcgcgcctgctgatgcgcgatggccagcggccggactacgtggccgggctgtccatcggtgcctacgccgcggcggtggtcgccgagtcgctggattacgccgatgccctgcggctggtcgccctgcgtggcgagctgatgcagcaggcctatcccgaaggcttcggcatgacggcgatcctcggcctgtcgctgggcgcggtggaggcgctgctggccgaagccgaggggccggcctacctggccaatatcaatgccgaaaaccagctcgtcattgccggcagcgatgccgccatggccgcggtcgctgctcaggccaaagcgctcggcgcatcctgcgcgcggcgcctggcgatgagcgtgccgtcgcattgcgcgctgctgcaggcgccggcaacgcagctcgccgaggctttcgccaagatcaacctgcgtgcgccgcgcattcgctatctcagtggctcgtccgcgcggccggtgttcgacgccgaacgcctgcgcgacgacctgaccttcaacatgtgccgcgtcgtcgactggcacggcaccctgcgcaccgcctacgagcgcggcgtgcgtttgcatatcgaactgccccccggctcggtgctgaccgggctggcgcggcgggtttttgaacagggtacgctggtcgccttcgacggcgcccggctcgacacactggacgccttgctgcgtcaggagggcagccagagccgatagaccgcgtgcacattcagcgcgagccagccttaactcgccgactgatcgatggataaaaacaactaactcgacaacacgcgcccagccctctgcaggctgcagcgcaaccaaaaggacaataacaatgatcatctttggtgtggcctttctggccctgtgtaccctcaccggcatcttcgtcggcgagttgctcggcaaggcgatcggcgtgccggccaacgtcggcggcgtgggtatcgccatggtgctgctgatcctcatcggcagctatctgaagaagcgcggcctgttcaatccggagtcggagcagggcatcaagttctggagcgccgtgtacatcccgatcgtggtcgccatggccgcgcaacagaacgtctacggcgctcttgccggcgggccaatggcgattcttgccggcgtcgcggccgtcgcgctggccttcatgctggtcccggtactggaccggatcggtcgaaaaaagcttgaggccgacccgacactgccggctgatccagccaagccgctcaccagcagcacacgggggtaacggccatgtacgaatcgctcatgaaagtgatcagcggctacggcctgatcagcggcttcgccatcatcggcgcaaccatgtggatctcctactggctgtcggacaagctcaccaagggtcgcctgcatggatcggcggtggccatcctcatcggtctgttgctgtcgtacatcggtggcgtggtaaccggcgggcagaagggcctggtggatatcgcgctgttctccggcattggcctgcttggcggagccatgctgcgtgacttcgccatcgtcgccaccggttttggtgtcagtgtcgacgagctcaagcgggccggcatggtcggcgtgctggcgctgttcatcggtgtgctcgcgtcctttgtcgctggcgtggcagttgcgttcgcgtttggctacaccgatgcggtcagcctgaccaccatcggcacgggcgctgtgacctacatcgtcggcccggtcaccggcgcggcgatcggcgccagctccgaagtgatggcgctgtccatcgctgccggcctggtcaaggcgatcgtggtgatggtcgctacgcccttcgtcgcgccctacatcgggctgaacaacccgcgttcggcggtgatcttcggtggcctgatcggcacctccagcggcgtggccggtggcctggcggccaccgatccgaagctggtgccctacggctgcctgaccgcggcgttctataccgccttgggctgcctgcttggcccgtcgctgctgttcttcgtgatgcgcgggttgttgggctaaccgttgcgccggtgagcggccgggcccggccctgccgctccaggcgagcgctgttccgcagcgccttcgatggatgccacgagcctcccgtccgcgtcatccgaacgtgggggttacagcgctggcattttctggcagggtaggcttcgaatcgcgacagaatgccgcaaccggcgctgacgcgaatcgatgtgattgcgggagagactgccgcatggcagcgccgaaggagcaaccgccccggaaactctcaggcaaaaggaccgctatcactgctgacactctgaagagccgcccggttttcgtcgccgggcgcaccgaaggagcaagcgagccgtcacgcgctcgtgaatctctcaggtccagaacagagggggcgcccgccgcgcgttgggcgcacgggctatgacccccttgacgttctggagcgacaacaatgaaaacaatcgcagtcatcggtggcggtatcaccggcgtcactaccgcctatgccctggccaagcgcggcttctcggtcactctgctggaaaagcaccgctacgcggcgatggaaacctccttcgccaacggcggccagctgtcggcctccaatgccgaggtctggaaccactggtcgaccatcgtcaagggcctcaagtggatgctcaagagcgatgcgccgctgctggtcaatcccaagcccagttggcacaagctctcctggttcgccgaattcatcggctcgattcccaattatcggcagaacaccgttgagaccgcacgcctggccatcgccgcgcgcgagcacctgtttgcctgggccgaggccgaaggcatcgacttcgacctgaagaagaagggcatcctgcacatctaccgcgacaaggccggcttcgagcatgccgggctggtctctcgcctgctcgccgaaggcggcctaccgcggcgcagcgtgacgccggaggaaatgcgtgccatcgagccgaccctggccggcacctattacggtggctactttaccgagtgcgactccaccggcgacatccacaagttcacccatggcttggctatggcgatcgagcgactcggcgtgcgttgtctgtatggcgaggacgtgcaggcggtggccactgacggcaagcgcgcgaccgtgacgctgggtggcgctgccggtggcgagcgcctggagttcgacggcctggtgatctgcgccggcaccgccagccgcgatctcgccgcacaactgggcgaccgggtgaacatctatccggtcaagggctactcgatcacggtcaacctgaccgacgaagtcagccgtgcctctgcacccatcgtcagcctgctcgacgatgaaaccaagctggtcagcagccgcctcggcgacgaccgcttccgcgtcgccggcaccgccgagttcaacggctacaaccgcgacatccgtgccgatcgcatccgtccgctggtggactgggtcaaccagtgcttccccggcgtcaacacccgcagcgtggtgccctgggccggtctgcggccgatgatgccgaacatgatgcccaaggtcggccgcggcagcgcgccatgtgtgttctacaacaccggccacggccacctgggctggacgctgagcgcgatcaccgcggacatgatcggtgacgtggtggcgcaaagcctgggccgcccggctccggtagcgtccgggcaaacagccgtcgcctagcgcaatcggcgtagggtggaagacggcgaagcctcttccaccgctgcggcgccggctctgcgcccacggtgtggctggcttcaagtcgggtgcaggcttgtgcgttccggccctgcgttgattggccatgtggggctcgggcgtcatcgtaatcctgcggtgttgcgaaagactgcgtggataagcttcgcgttatccaccctacgttgcgcaacacagtggtcgtagggtggaagacggcgaagcctcttccaccactgcgccgcccatctaatcatcttcccgtcccgctcggccgcatgcggacgctgcttcagctcgggtgtttcaggctgtacatccggcattcggcgagcagtgccagcaggttggggtcgcgctccttggccttgaggaagaccacgccgatatgctgttgcaggtgataacgcgcctgcaacgggatcagccgcacccgcgattcgtagaccatgccaacccgtcccggcagcagcgcatagccgacgccggaattgaccatgctgagcagggtgaagatgtcgttcacctgcatcgccaccttcggctcgaagcccgccagctggaacacccggttgccgtcctggtgggtggcgaagccctgggacagggtgatgaaggtggcatcgcgcaggtcgctgaggtccacttcgctctgattggcgaaaggcgagtcggccggtgcggcgaggaagatgtcgtcggaaaacagctgcacctgggcgcagtccgggtcggccacgctttcgttgagcgacaccaggatggcgtccagctccatgttcttcagcttgtagagcaggtcgacgttggagccgaggatcaggtcgatgttgagttcgctgcggcgcagtttcagacccatgatcagctgcggcacggtcttcaccgtcagcgaatacagcgcgccgagcttgaagcgctcggccgaaaagcccgcggcctcgcgggtctggcgcaccgtctcgagcacatccttgaccagctgctgggcgcgctcctcgagcacgtaggcgctctccagcggaatcaggttgcgcccctcatgcttgaacagcggacagcgcagcgcgctttccagggaatggatggcgcggtgcacactgacgttgctggtgttcagctccaccgcggccttgcccagattgccgctgcgcatgaaggccagaaacacttccagcttcttcagggtcagttcttcgtcgatctgcatggcttcggctccgcgggcgggtcgacgattatgccggacgagggcgcactgcggcgcctcaccagcgcagcaggcgcggcccgagcagtgcaccgagcacgccgggcagcaacatgccgagcaggtaccagagcgcccagaacggcaccgccatctctgggcagtgcaggctgtaggcgagcgcggcgacgctgccggcgagcaggccggcagcgccgccagccaggcgcgggcgtgtcggtgccagcccgcgcaacgcccagaacgcggcgatgaacgcggggatcgacagcagcgcgatgttcgccaggcactcgcgccaggtgttgccgagcagcagtggcacgcgcgcgtcggccggggcggcaatcagaatcgccagtgcggcgacccagacgatcactaccggcgccgccagcagcgcccagctgcgatctacccgcgtgccggggcgggccatgcgcatggtcagcaacagcgcaccgaagagcagggtcgccggcagtgccagcttggcccagaacagtggtgtcccggcgatggtcgccaggtcggcgcgaatgccgtacgcggtcacgatcagcaacagcgcgccggccaggccgcacagcagcgcgatggcgaagcgcttggcaacgacgtgccggtccaccggtgcaacctcgctggcgagcagggcgatcaggtcatcggttttcatgcgccacctcgaatctacgccgccagggccttgagcccgcgatggatgccgaccttgatcgccgagctggaaagcccggtcaggcgcgcggtttcttccaccgagcggccctccagtttgacgtgaacgatgggtaaccgctggcgtggcggcagctgctccagcagcttgcccaggtcacggcaggcctcggcctgcacattgtcctgtacggcgaacagctcgtcggcctcgtccagccagtccatttgcgcggcctggcggccacgggtgcggtagtggtcggccagcttgtagcgacagatcgcctgcacccagaccgtcagcggctgctccgcgcgataggtctgccgcgcattgtgcaccgccagcagtacctcctgcagaacgtcttccagctcgctcgactgggataggcggcgacgcagaaaaccgcgcagatggccgccgagctggtcgaggaatgcccggtaggccctcgcatcgccatcgagcccgcgcagcagcagcgcgcgcagctcgctctcgcgggcctggagtgtctcctgagaggtagttcgttccatcggctgctctggttacaggtggaaccgcgaaatgtccgccgcccgtcggggcagggtcacggtagggacgtcgcgaagaaatctcaaaataatttttagctggctgtaaccaccgcgactgacgcagcgaattacctcaggagccatctgcagattcgccgatggccactcaacgattgcggagaatccaacatgaaggctctcaaccttgcggctgccgccattgccctggcttcgatcgccgcgggcgctcaggcaggcgagaacgacaaaggcgacatggaaaaatgctacggcgtcgcgctggccggacagaacgattgcaaggctggtgccggcaccagctgcgccggcagttccaagcgcgattaccagggcaacgcctggaaactggtgcccgccggcacctgcacctcgatcgagacgcccaaggggatgggctcgctgacgccggtcgagcgctgagcctagcgtgccggccatgcagattctcggagcagggctcgggctgaaacccgagcattacacggacgcctgggcctgcgtggcggaggggctgtggttcgaggtccatccggaaaactacatggtcggcggtggcccgcggctcgactggctggaggtggtgggcgcgcggaacccgctgtcgctgcacggtgtgtcgctgtcgctggccgccgactgtgcaccggacgaggcgcacctgcagcgactcaaggcgctggccgagcgtgtgcggccggcgctgatctccgaacacctggcctggtcgagctggcgcggaaattaccatcctgatctgttgccttttccgcggaccacggcggcgttgaggcgaatcgcggcgaatatcgagcgcacccaggagatgcttgggcagcgcatcgccatcgagaatcccagccattacctgcgcttcgagcaacatgagtgggacgagatcgattttctcgccgagctcagccagcgcaccggctgcggcctgctgctggacgtcaacaacgtgcaggtcagcgcgcacaacctgggcttcgatgcggccgcctacctgcggcgctttcccgccgcgccgatcatggagatccacctggccgggcacagccgggatgacgcgtcttcgctgctgatcgactcccacgatgcgccggtggacgcggcggtctgggcgctctatcggcaactgatcgagcgtatcggcccgcgcccgacgttgatcgagcgcgacgaccagctgccggctttcgagacgctaatggacgagcgcgctcgtgcccagcagacgctcgatgaagcggggggctggcaatgagcggctcgcttgcggcatttcaggacgccttcgtcgcggcgctgaccggcgcgcccggcagtgcggcgggcgaggtcgctgcgctggtcgcgcagcctggatttgcggtgtaccgcaacacgctgctcaagggctgcgtcgatgcgctgcgcgccaatttcccttctgtcgaacggctggtgggggaggagtggtttgctgccgccgcgacgctgtacgcgcgcgaaatgctgccgcgcagtggcccgctgcttgagtacggtgaggattttcctgcgttcctgcagggtttcgaaccggcgcgagcgctgccctatctcggcggcgtcgcgcagctggaccggctctggcgcgaggtattcggcgccgtggaacaaccggttctcgtcctcgctgccctggcgacacaggccccgcagcagctggcccggcagacgctcgttccgcgcgctgcgctgcgttggcggtggttcgccgagctgccggttttcagcatctggagttgcacccgtgaaggacgccaggtgccggcagagctggtctggcaaggcgaaggggtactgctgagccgaagcgccggccgcatcggctggcagccactcgagcgagctggttgtgtatttctcgacgcctgcgccgctggcgtgtcgctggaacaggcctcggaacttgcactggcgatccagccagaactcgacttcaacgacctgctacgccggctgctgagcgcgggagcgttcgccgccctggtgcagacggctcaacccgactgaggacaatcaccatggaaacttcccagcgtcgacaaagcagcgccatccaatcttccagcctgctgcagcttctgctccaacaatggaatcgccttgcacagacgctgcagctgctgctcggcgattcgctgctgagcctggcggcacggttggccgtagcggcgatcttcctgctctccgggcgcaccaaggtgagtggcgtgctggacatcaccccgggcactttcgaactgtttcgcagcgagtacgccttgccgttactgccaccgcatatcgcggcgcacctggcgacctatgccgagcatctgttcccgctattgctggtgctcggcctgttcacccggctgtcggcgctggcgctattgctgatgacgctggtgatccagctgttcgtctaccccgacgcctggtcgactcacctgagctgggcggcactgctgctactgctgatcgggcgcggcgccggccggctctcgctggatcacctgctggggattcgctagcgccggccttgaatcgccacgtcaggcaggcacgacgtcttcatcctcaggaatctcatcggtgacaaacacggtggcgtgatcgctcagtgcgtcgtcgatgcgcaggccgaagtaacgggcatcattggcgtcccagaacgcctcgacctgctcaagcgaggcctgctccagcaggacctggccggtgtgttcgagaatgatggaatagcggcgattggcggacatgaaagtgactctgatcatcggaagggctgcacccgcagctgtgatgtcattttgtcacttcacgcgacttaatccctgtccgttcatcgcccgagtctgcttctctgccgaacggttttttcgcttggaaaactagagctgggttatcacatacggtgccttgcgttaggcaatggcaccggcgcttcgtggcgtgctggccgacagccgttccgcattctggttgtcttcgatggcgcgccattgtgcgatcagctctggcaggtccggccgctccgcgtgttcgccaaagacgctgcgcattgacaccacccgctccgcctgggcaagcaggcgctgctgtgtgcgagtcaatgcggggctttgttcggctcgaacgcgctcgccttgctccaccgcatcggcgtagatggcgcgcagttcgagatccgtcttgccgtagaagcgcattattcccctgcgcctaagctcccagcggaattcattgaaggagcgcgcttgccagctttccagcagctgcgcggtactcaggacttgggcataaatgtcgcgaacctcagcgtcggtgaacagcctgccgttgcgctgctctacgctgacagtccagcgcagcaggttggccagcgccgctcgcgcatagccgctgtcgctcgagtgttgagaacctgcgagcgcaacgcgcttcggcatatctccatccagaccgatttcgccgatggtacgagcgcaggtctgctcggcaatcatcgcgcagcccggctgccacagaatcgccgtctcgctgcccgcgccgggcttgcgcggcatgaaatgccattgctccccgtgatgctcgtagggatcaccttgaaggttcacgatccccgcgaggagcagcgcaatgccgagagccggtgagctatacaccaaagctgcaccggggagtgccagcctccattcggcatccatccacggcagtggaagcgcaggtatggggtcgttgtgattgacgatacggtggtgcgtgagagaacgtgcggctttgacgaaggccgcgtcgcccgcgcgtggggcgccgaaggtgtagaggattaccttaggtttggtgggcttgcgccgtagccattcggccagcaggagtgcaatggccccgcctaagctgtggccacatatgatcagcgtttgttcgccggtataaaaggcatttaggtagcgctctacgaatggctttgcagcctgaaatcctttgtagaagccgcggtgtgcttggccttcaccttctttgtatggcacctggcgggcatctgcatctcggctggcgtcggccagaaactcctgcgtaccgcggacggaaatcaatacgatcttgtcgttatgggtgatgaacgcttgggtgttggtatctgtttcgttatccgtgtcgtgcaagaagtgcacatcttcgggatttcgccagccctcctgtgcttccttttcatagcgcgccggatcgtaaggcatgatttcgaggcgcttcgaataaggcacttcttcacagagcagatgatagggggacgcggtgttgaattgtgttggctgaatcctgcgtcctagctggttctgaaatacgtgtccgatgctgccaagcgctgaatagggtggcggtgctgaagagtaaggattggtagaggtgctgaatggggcgtaggcgaaggcgctc

SEQ ID NO: 87 - DNA, 35286 bp, Unknown
  From metagenomic library of CO182
tggcgcggatttcccgcggccgcaccatccgcgagttcgtcatcggcacgctgctgctgccgctggccttcatgatggcctggatgtcgatcatgggtaacagcgccatcgagatggtcatgggcggtgccctcgaattcggtcagcaggcagtgagcaaccctggctcgtcgatctatctgttcctgcagagcctgccgtggtcgggtatcaccaccatcgtggtgaccatcctcgcgatcgtcttcttcgtcacctccggcgactccggttcgctggttctgtcgaacttcacctccattctcaaggatgtgaacagcgatgcgccggtgtggatgcgcattctctgggcggcgatcatcggcattctcaccctggcgctgctgatcgccggcgggctgaccgcgctgcagggcaccgtggtgatcatggggctgccgttctccatcgtcctgctgttcatgatgtacgggctgttcaaggcattgcacgtcgaaggcgtcatggccgacagctaccagaagagcctgtcaggctacctgtccgggcgcgccacgctggagcacacgcagatgaactggagtcagcgcctgtcgcgggcgatgagtttccccagccgttcgcagatccgtcgctacttgaaggatgtctgcaaaccggcgatggaggagatccagaaggcgctgggcgagaagggcgtgccggtggatatcgtcgaaggcgagccgggcaacgagcacctggcgctgcacgtcaatctgggcagcgagcaggacttcacttaccagatctggccggtgcgcggcaccatgccgtccttcgccctgcgcacgcagagcggcaacgccgactactaccggctcgaggtgcatctgcgtcagggcagcctgggttacgacctgatgggctactcccggcgccagctgatcgaggacatcctcgaccactacgagcaccacatgcacttcctgcatctgcagcgcgagaacggtggtggtgaaagcggcatgcccaacccgggcgcaacgccaacgccctgaccacacgcgtccgggcgatccccggacgttccattcacgtcgcggcagcgccgatccgctgtcgcctcgatcacaggagctagaacatggcccgtttcccacggcagcaactctatatccatggcggctacgtcgacgccagcagcaaccagaccttcgagagcatcaacccggccaacggcgaagtcctggccgaagtggcggaggccggtgcggccgatctggagcgcgcggttgaaagtgccgagcagggccagcgcatctgggcggcgctgaccggtatcgagcgggcgcgcatcatgcgtcgcgcggtcgatctgctgcgtgagcgcaacgacgagctggcgctgctggaaaccctggataccggcaagccgctgagcgaaacccgcagcgtcgacatcgtcaccggtgccgacgtgctggagtactacgcgggcctcgccccggccatcgagggtgagcagattccgctgcgcgacagcagtttcgtctatacccggcgcgaaccgctgggcgtggtcgccggcatcggcgcctggaactacccgatccagatcgccctgtggaaggcggcccctgcgctggccgccggcaacgcgatgattttcaaacccagcgaggtgacgccgctgagcgcgctgaagctggcggaaatcttcagcgaggccgggctgcccgatggcgtgttcaacgtgctaaccggtagtggtgccggtgtcggatcgctgatcaccgagcacccgcgcatcgccaaagtgtcgttcaccggcggcgtggccaccggcaagaaggtcatggccagtgcggcggcgtcgtcgctgaaggacgtgaccatggaactgggcggcaagtcgccactgatcgtctgcgaggatgccgatctggatcgcgcggccgatatcgcggtcatggccaacttcttcagctccggccaggtgtgcaccaacggcacccgggtgttcgtcgcggccggtctgaaagcggcgttcgaagccaagctactggagcgggtgcagcgcattcgtctcggcgatccgcagcaggaggcgaccaacttcggtccgctggtcagcttcgcgcacatgaacaaggtgctcgactacatcgacaagggcaaggctgccggcgcgcgggtgctctgtggtggcgggcgggtgactgaaggcgaatacgccaagggcgcctttgtcgcaccgaccatcttcagcgactgcagcgacgagatgagcatcgtgcgcgaagagatcttcggcccggtgctgagcctgctcgaataccaggacgaggacgaagtcatccgccgcgccaacgacaccgagtacggcctcgccgccggcgtagccaccagcgatctggcgcgggcgcaccgcatcatccatcgcctcgaggccggcatctgctggatcaatacctggggcgaatcgccggcgcagatgccggtcggtggctacaagcagtccggcatcggccgcgagaacggcatcgcctcgctggcgcactacacgcgggtcaaatcggtacaggtagagctgggcgagttcgcctcggtgttctaagggaggtttgaaccatggaatatgactacatcatcatcggcgccggctcggcgggtaacgtgctggccgcgcgcctgaccgaggacgccgacgtcagcgtgctgctgctggaagccggcggcccggactatcggctggatttccgcacccagatgcccgccgcgctggcgtatccgctgcagggcacacgctacaactgggcataccagaccgaccccgagccgcacatgaacaaccgccgcatggactgcggtcgtggcaagggcctgggcggttcctcgctgatcaacggcatgtgctacatccgcggcaacgccctggactacgacaactgggccaaggcaccggggctggaggactggacttacctcgactgcctgccgtacttccgcaaggccgagtctcgcgacatcggccccaacgattatcatggcggcgatggcccggtcagcgtgactacaccgaaggccgacaacaacgagctgttccacgccatggtcgaggccggcgtgcaggccggttatccccgtaccgacgatctcaatggcttccagcaggaaggcttcggcccgatggatcgcaccgtgacgccccagggccggcgtgccagtaccgctcgcggctatctggaccaggccaaggagcggccgaacctgaccattcacacccatgccgtcaccgaccgcgtgttgttcgagggcaagcgtgccgtcggggtacgttacctgcgcggccgcgagcagccccacgttgcgcgcgcacgccgtgaagtgctgctgtgcggcggcgccatcgcctcgccgcagatcctgcagcgctcgggggttggccctggtgcgttgctgaagaagctcggcgtcacgctggtgcaggagctgcccggcgtcggccagaacctgcaggaccatctggagatgtacctgcagttcgagtgcctgaagccggtgtcgctgtacccggcgctcaagtggtggaaccagccggcgattggcgccgagtggctgttcctcggcagcggcatcggtgccagcaaccagttcgaggccggcggcttcatccgcagcagcgacgagttcgagtggccgaacatccagttccacttcctaccggtagcggtcagctacaacggcagcaatgcccatgacggccacagcttccaggcccacgtcggctcgatgcgttcacccagtcgcggccgcatcgagatccgctccaccgatccgcgggtcgatccgagcatcctgttcaactacatggcccacgagcaggactggcgcgagtttcgcgatgccattcgcattacccgcgagatcatcgcgcagcccgcgctcgatccctaccgtggtcgcgagttgaatccgggcgtggaggcgcagagcgatgccgagctggacgccttcgtccgcgagcacgcggagacggcctatcacccgtcctgctcgtgcaggatgggcaccgacgacatggccgtggtggacgggcagggtcgcgtgcatggggtggacgggttgcgcgtggtggatgcctcgatcatgccgcagatcatcaccggcaacctcaacgccaccaccatcatgctggccgagaagatcgccgaccggattcgcggtcgcgagccgttgccgcgcagcacggcgagctactacgtcgccaacggcgcaccggtgcggcaaccgccgcagcgttgacggacctgcagtccgtcggtggagaaggcctcgccgaggactggttgcacagaaatgaaaacgccccgctagtgcggggcgttttcgtgtggcggagcagttcagatcacttcggcccagaggtcgtactcgtcggcgttggtgacgcgtacgcggaccttgtcacccggctgcagcggctgttcgctgtcgatgtagaccatgccgtcgatctccggggcgtcggcccaggagcggccgatggcgccgtcctcgtccacttcatcgatcagcacgtccagttccttgccgaccttcagctgcaggcgcgcggcgctgatggcctgctggtgcgccatgaaacggtcccagcgatcctgcttgatctcgtccggtaccggctccagccccatgacctcggccggtgcgccgtcgaccggcgaatactggaagcagccgacgcggtcgagctgggcttcggtcagccagtcgagcaagtactggaagtcttcttcggtctcgccggggaagccgacgatgaaggtcgagcgaatggtcagctcggggcagatctcgcgccacttcttgatgcgcgctagggtcttgtcttcgaaggccgggcgcttcatggccttgagcaccttcgggctggcgtgctggaaggggatgtccaggtacggcaggatcttgccggcggccatcagcgggatcacgtcgtcgacattggggtaggggtagacgtagtgcaggcgcacccagacgcccatcttgcccagctcctcgcacagctcgagcatgcgcgtcttgaccggctggccgttccagaaatccagcttgtacttgaggtccacgccataggcgctggtgtcctggctgatcaccaggacttccttcacgccggccttgaccaggcgctcggcttcactgagcacatcgcccaccggacggctgaccagcttgccgcgcatggacgggatgatgcagaagctgcagctgtggttgcagccttcggaaatcttcagataggcgtagtggcgcggggtgagcttgatgccctgtggcggcaccaggtcgacgaaggggtcatgctcgatgttcggcggcaccacttcatgtaccgcattgaccacctgctcgtactgctgcgggccggtaaccgccaacacgctgggatgcacgccgcggatgttgttctcgtccacgcccatgcagccggtgacgatcaccttaccgttctcggcgatcgcctcgccgatggcgtccagcgattcggccttggcgctgtcgatgaaaccgcaggtattgaccaccaccacatcggcatcctcgtaggacggcacgatctggtaaccctccatgcgcagctgggtgaggatgcgttcagagtcgaccgttgccttggggcaacccaagctcacgaacccgactgttggcgttttgctcatcgactttgaacctcgaaaaccgcgcatgaaaaaggcgcgcgagtatacagagctgagcattttttagccagtccagaagcggcgcacgcggctcgatatgcagcacgccctgacgtggcatggcgccaccgcttccagctgcgaggggcgtcgctgcgggtcaggctccgatgtcgtattcgatatcgacgagcggttggaaagactcggtgagatcgctcacgccggtcgcgccagtccggcgattgcggtattcgcttggcgtgcaaccggcgaactgcttgaacgcccgggcaaagtaggacgggtcgcggaaacccgcctcgtagccgatggtggtgatgggcatctggctattgtccagacggtccttggcgaactccatgcgcttggcaagtatgtgctccacgtagcagaccccgtacacatccttgaacagccggctgaagcgcgacggtgtcatgccgcagagctgcgccagctccttctggtcgatgttctcgcgaaaatgcaggtcgatgtgctgcagcgcgcgcgccagcgattgatgcttgcgatggtccgcggtcagcctgacgcaggcaggcaactccgggaatacctcgctcatgggctgccgcgggccgctcgcgccgatgcgccgcaacgtatgcagttcgagcaacgcccttcgatagcgcgccatttctgccggtgaaatgggcagcgtgatgtattcccatacccgcgagcgcatcgcccatacggcgagttcctcggtgtgctggacggtgaacatggtgatcggaagggatggcacggagcgcttgagttgctgcaactggctcagcccgagcgcgtcgggtcgatcaaaatgcatgcagatcatgtctgcctgacgcagatgccggcccgaatctgcgacgagggagtccggtgcgatcagccgacaatcgcaaaagtcactgaactgagccatgagcgctcgggtggagcgctcgcaggtcatgtcgagccagaggaggctggggcctgtcgcggagttagacatcattactagctctgccgattgttgttgtgcgcctcaaacagtattggcaataagccattattgctaagaaccaattctgctaactacgtcacattttgttgcggataagttatgtgccaacgtggcctccgcatgagctgaatgggaggcctctgagcgcttcccaccggtgcggcgccgtgtcgcatcccttctccatatggctatgcgtgtacaggcacaacgccagtaaaaaaatgctagcgaaccgcaaaggactcctaactgccgctcccgcttcccgcctagggtgaaaccagagcagggattaatcctgccggctccgggtaatcacatcgagaggtgagcgagatgaaacttcagtcgatcaaaagcgcggtagtgaggttcgcgaaggatgaggaaggcttgaccactgtggagtatgcgattgccggtgggctggttgcggcaacgctgatcactgcgttcaccaatcttggcacgatcgtgcttcagaagatcaacgccatcatcacgggcctaggtgggactgcgggctagctggctgtgatcgcgcagcagggatgggtaggtggtgtgcttctgctggcgctcctagcgtgtgcgtcggcgaacgatctccgccggcatcgcatccccaacgcattggtgctgatcggtatcgctttagggattaccggtcaggtggcgtccgatggctggttcggtctcggcaatggattgctgggtgcgctgatcggctttgccatcttcattccgctctacgccctcggcggcatggccgccggcgacgtcaagctgatggcgatggtgggcacgttcatggcgccgcagcaggccctgctggcctcgctgttggcgctgatggccggcggtgttggtgggttgttgctgatcgctgtgcacgggcagctccggcaaacgctgatccggtacacggtgatgctgggcactcaccgctacctggtgccggccaaggacgaagttgccggcaagcgctttccctacgccatcgccattctgctcggcaccctgggcagcatgttgtggttcgaattcgcccgctgaaggggatgtgtcatgcatgtagtcatcgatcatccgacccgggaccgcgagtacgcagtggtccagcagcttgcgccacagccccgcagcatcgccgataccggtctggacgaggcgctgctgggtgatctcgtctgcaagcatctgcacgaatccggagtgcttgatatcggccggctggccgaccgcctggcgctgtcgggcgcggtggtcgatgaggtgctgggccagctgcgcaaggacggcagtgtcgaggtgctcgggcagaacggtggcagtagcggtttgcgctacgggctgaccgagcgtggccgcatggcggcgcgggatgccttcgcgcgcagcggctacctcggcgccgctcctgttccggtgagtctctattgcgccttgctcaagttgcagaccattcatcacggacgggtgaccgagcgggccgtgcgcgccgcctacagtggcgtggtgctggccgaggatctgctggaacggcttggcgtggcgatgaactcgggccgcgccatgatgatttacggaccctccgggaccggcaagacctacatcagcagccgcctgatccgcttgctcaacgaggcgatctgggtgcctcacgccgtggtgatcggcgatgccgtgctgcagatctacgacccgcagatccactgtcggctggagagcgaacaaccggccagcctgctgctcgaccagggcatcgaccgccggctgctgtgctgttcgcgaccactgctgaccactggcggcgagctgaccatggatcagctcgaaatccgccatgaccccatcagtcggcaataccacgcgccgctgcagctcaaggccagcaacggcctgttcatcgtcgatgacctgggccgccagcgcatgccgccggccgagctgctcaaccgctggatcgtgccgatggaggagcgccgcgacttcctcaacctgggcggcgggcgccattgcgtagtgccgttcgatctgattctggtgttctcgaccaacatcaacccgctggacctcgccgacgacgccttcctgcggcgcatcggctacaagctgccgttcggctacctcaagcgcgatcagtacgaacgcatctggcggcaggaactggacaagcgcggccagaccttcgatgcgacgctgctcgaccacgtcctgaccgagctgcatggcgccgaaggcgttccgctgctgccgtgccagccgcgcgacctcatcgatatggcgctcgatcgccagcgctacctggaccgcagcggtccgttgacggccgacgacctggactgggcctggcgaaactacttcgtccagctcgaatttctcgaatgaaggagattggacatgggctcccgtacgttttatctggtgctgttctcgctgctgctggggctgggtgcgagctggatggccaacaactggctcaacgccaggctcagcgcggcgcctgacgaccagcagcgcaacgtcgtggtcgccaccatggaaattccgttcggccaggccatcgaggcgcagcaggtgatggtcgtgcgcatgccgcggggcacagtgcctgacgatgccttcgacgcggtcgatcaggtcgccggcaagatcgccacattcagcatgctgcgcggcgacatcgtgcgcggtgcccgggtagccgagcatctgggcggcagtaccctggcctcgttgatcgctaaggacaagcgcgcggtatcggtgcgggtcgacgatgtggttggcgtgggcggcttccttctgcccggcaaccgggtcgatgtgctggccactcgtcgcatcggcagcggtgaggaaaccgaagccaagaccattctccaggacctgcgcgtgctggccgttgaccagaccgccagcaccgacaagacccagccggtagtggtgcgggccgtgacgctggaaatggcaccggacgaggcagaggcactggtcaaggcgatgagcgagggccgcctgcaactggccttgcgcaacccattggataacgacaagcgcgcagccgccgagccgcagccgctgcaggtggctgcgcccgcaccggtggtagtaccgcccaagccggttcagcgtcagcgggctcccgccgaaccaggcgtcaccatcattcgcggcaccgaggtcaacgtcaccaaggtgaggctctagcgcgatcactgccaacaccggcggcgtcaccagccggtctgcaaggagattcacatgaacagcatgagcaaagtgcagctactggccgtcctgctgggtggctgggcggtgctgggaacgccggcgaccttcgcccagcagccggtttcggctacggcggtgaaagcgatgccggcggtgaacaacagcgacgtgcaggtgcccatctacaagtctcgcgtgctcagcacgcgggctccggtcaaccgcatttccgtgggcaacccggcgattgccgacattctcatcacctcaccgacacagctttacctgctcggccgctcgctgggcagcaccaacgtgctgctgtgggacaaccgcaatcagctgatcgacagcctggatgtggaagtggtgcacgatctcggcgggcttaaggccaagctgcatcaggtgctgcccaacgagcgcatcgaagtgttcagcgcacagggcgcgctggctctgcgtggccaggtcagcagcgcagcagccatggacagcgcggtgaagctggcccagagctatgcggcgcaggcctcggctgctgaaaacagcggcgcagcgatgcagaacaagccgctggaggtgatcaacctgctcgggatcggtggcagccagcaggtcatgctggaggtgaaggtcgccgagatgcagcgcagcctgttcaagaatctggatgtgcgcttcaacgcgctggatttcggctcgtcgtcacgctggtcggggggcggcttcaataacggtctgaacgccgatggcggtgtcctgggcctgaaccctgatgggcaggtggaccctagcaagctgatcggcagcggcaaggccatcttcgggcaattcctctcggagaacttcctgttcaatgtcgtgctggatgcggccaaggacaacggtacggccaaggtgctcgccgagccgacgcttaccacgctgaccggccagcaggcggaattcatttcggggggagaattcccggtcccggtgtcggacgacgatggcatcaccatcgaatacaaggaattcggcgtcggcgtgaagttcctgccggtggtgctggactcgggccggatcaatctcaacctcaacgtggcggtcagcgagctgagcaacgccaatgcgctgatgctcacgaccggcctgggcggaaccaacagcgtcggccagctggtgccttcgctgaccaagcgcagtgcgcagtccaccgtggaacttggcaacggccagaccatcgccatcgccggtctgatcagcgagaacagccgcgattacgtcagccgcttcccgggtctcggcgacattccggtcctcgggcaactgttccgcagccagcagtacatcaacggcgagaccgaactggtcatcctggtcacccctcatctggtcactccgctggatgcgaaggccgtacggctgccgacggaaaacttcgtcgagcccagcgacctggagttctacctgctcggcaagaccaagggcagccagcccgggcgtgctgtgccggtcagcctcggtgtcagcgaaggccgcttcggccacgacctcaagtaacgggagagcagcatcatgaaacggatcattgcggtgggcgtgttggctgccctcggtggctgcgtgagctatgacgagggccgcgtcggcccgctggggtcgaccgtgtatctgagcgaatacctgcagatcgtcgacaagcagaaggccgccaaccccggaacaggcctggcggcagagggcgtcgatgggccgctgacggagaaggtgatggaaggctatcgcggtaccaccggggatgcgacgcaggtggcccagccgatccagatcaacgtcaacaactgaggcgctcgccatgacagtccgcagaagcaacaggccgctaccggcacgccagcgcggtgcggtcatggtcctcgcggtgctggcgctgctgtccattctgttgatggcagcgctggcgctggatggcagccatatgctgctgaacaagacccgcctgcagaacgcggtggatgcggcggcgttgagcggcgccaagaccttgcagcaggtgctgggctccggtaactcggccactctgagccgcgacgccgcactcgcaacgctgcggctcaacgcccaggcgcccggaaatgcagagctgaacagctcgctcggaaccggtggtgcgagcttcgcccgggtcgagctggccgccagcgtctatggacccttctcgtttcccggcccactgaatgcacgctacgtaagggtgtcagtgcccaactacggtttggtcggctttttctggcggatcatggatatgtttggcacggcgccggagaaaaccgttgccgccgtggcgacagccggccccagcccgaccaatccctgcgacatcgcgccgatgatggtctgtggcaaccccgaccagtacaacgcggcgaacgaactgttctggggctaccgcttcggcgacctgcaggtgctcaagggggcatccaataacgatccggttatcggccccggcaatttccagctgatccgcctgggcggggccagtggtgcttcggacatgcgggatgcgctggctggcggcatcgagcgctgcaacgtggtaggcgacacggtgcctaccgagccgggcaacaacgtcggcccggtggcgcaggggttgaacacccgcttcggtgtctatgacggcccgatcagcagcaagtcagcgagctatccgcccgatcaggtcatcagtttcagcacgccgcgcatgaccttcaatagcaacgtgaccccgccgcgcgccgaatatcagaaccagccggtgcagtcgcgcaatggcgatctttataccaccagccacgcgctgctggatttcaacgactggcagcgcagcgtcgccaactgcccgaacggttgccaggcgaacggcgtgttcgaacgacgggtgctgaagatcgtggtgggcaactgcaatggtgcgtccgggggaagcacctcggtgccggtactcggcttcggctgcttcttccttgtgcagtcactgcccggcgggcagggcaatcaggcggtggtgttcggccagttcatccgtgaatgcgaaggcgacaacgtgcccgggccgaactctgtcggcgagacggggccgcagatcatccagctgtacaagacctatatcgacaacagccggacgcctagcagcgattcctgaaggaggcggccatgaagcgcaacggagcggcctatggggcagggcagcgagggctggccatggtggaatttgccatcgtgctgcccttgctgctgctcctgctgctcgccatcggcgagatcggccgcatgatgttccagtacaacaccttgctgcaggccagccgcgacgccagtcgttacctggccggcgaagcgcgcaatcgcaccctcggtcagctcgagctttccaccgagttgctgacccgcacgcgggcgctggcggtgtatggcgtgccggtggcatcgagcagtacggtgccgctggtgagcggcttgaccaccggtgccgtgcagatttctgcggtcggcagcgaccatgtgcaagtgagcatcagctacctgttcgttccggtagttggccaggggataccggcgctcttcggcaatggcttgcgtctgggctttccgctggtcgccacgaccgtgatgagggtgctgtgatgagccgggtgcgccagcacggcgcttacacggtcgagttcgcgattgtcggcctgctgttcttcgtgctgctgttcggcgtgctggaaatgggccggctgctgttcaccgtcaacgcgctgaacgagagcgcgcgacgcggcgcaaggctcgccgcggtgtgcaacatccaggacccgcgcatcctgcggcgggcaatcttcaatgatgcagatcagagcggtaccagcccgctgattggcaatcttgaaaccagccacctgcgtctggtctacctcaaccaggacggcgcgcaggtggccagcccggccgacaccaacggtgtcaccggctaccgggcgatccgctatgtacagctgcgcatcgaaggctttcccttcgaactgctgattccgacgctgcagcgtgtgatcacgctgcccacgttccagtcgacccttccccgcgaaagcctcgggcgtcaccccgaggccaacgttgttccggagatcaccccatgctgaagcagacgcctcccagcgcccctgccgcttccatcgcacgcccgttgcagttgctgatcagcagccgcgacgcggcggcgctggagcgcctgaggaccgtcatcgggtcgcaccccgcatggcaggtcacgacacggttggtcaacaacggccataccgatcccctgttcggcctcgatcatctgccggacctgttgctgctgcacgtgagcagcctgtggcgcgacgagctggccgcgctgctgttgcgtccggctggccagcgcccgccgttgctggtctgcggcccgctggatgagcgggaggggctgcgcctggcgatgcaggccggggcacgggattttctcgccgagccggtcgtggccgacgagttgctggctgccatccagcgtgttgccttcgagagccaggcaggggtcgatgccggtggacggctggtagcggtgatgaatgccaagggcggctcgggcgcgacgatgctggcctgcaacctggcgcatcagctcagtggccatggcgccagaacgctgctgctggatctggatctgcaattcggctgcgtggctcactgcctggacgtcaggccggcgcacagtcacctcgaagtgctgcagcgcatcgatgagatggacggcatggccctgaacggcttctgcagccacttcagcccgacgctgcatgtgctgggtgggcgtcccggcgagctgtgcctgactcaggacgtgcgtctggagcagctggaaagcctgctcgatctggcgcggcggcattacgactgggtggtggtcgatctgccgcgacagatcgatcacctcaccggtatcacgctggagcaggcggatcgcatctatgtggtgctgcagcagagcctgagccacctcaaggatgcgagtcgcctgctggccatcatgcgcgaggacatgggcatccaggcccagcgaatccaggtggtggtcaatcgctacgacaaggcggcagcggtgagcctgcaggacatcggcgaggcactgcattgcggcgagccgatccggctggcgaacgactatgcggtggtcaacgagagccagaacgccggcgttccgctcgggctgcacgccccgcgcgcgccgatcacgcagggcatccgccagctcagccaggccttgctcggcgctcaggtcgaggcgccgagcctgctcaagcgcacattcggtcgactgttcgggggaagccatgctcagtgaattcaggaacagactgcaccgtcagaccggcaaggacagcgcgccggccaatcctgtcgctaccgccgagcagcccgcgagctgggaggctgacgcgccggagaatctgtacgaaacccgcactcagctcaactccatcgaggccgaatggcgtgagcgcatctaccagcaactgctgaaggtgatggacctgtccttgctggactcgatggaaaacgccgaagcgacgcggcagatccgcgatatctgccagcgcctgctggatgaccatgcagcgccggtgagcagcagccgtcagctcatcatcaagcagatcagtgacgaagtgctcgggctcggcccgctggaacccttgctcgccgacggcacggtgtctgacatcctggtcaacggccatgcctcggtatacgtggagcgctacggcaagctgcagcgcaccgatgtacgttttcgcgatgaccagcacctgctcaacatcatcgaccgcatcgtctccagccttggcagacgcatcgacgaatcctcgccgctggtggacgcgcgcctgaaggacggctcgcgggtcaacgcgatcatcccgccgctggccatcgacgggccgagcctgtcgatccgccgcttcgccgtcgacctgctgaacgccgacagcctggtggagatgggcacgctgacgccttccattgcgctggtgctcaaggccatcgtgcgcggccggctcaacgtgctggtatccggcggtaccggcaccggcaagacgaccatgctcaacgtgctgtcgagcttcattccgcacaacgagcgcatcgtcaccatcgaggattcggcggagctgcagctgcaacagccgcacgtggtgcgcctggagacccgtccggcgaacatcgaggggcgcggcgagatcaatcagcgcgagctggtgcgcaacagtctgcgcatgcgcccggatcgcatcgtcatcggcgaggtgcgtgggcccgaagcgctggacatgctggccgcgatgaataccggccatgacgggtcgatcaccaccatccacgccaacagcccacgcgatgcgctgggccgtatcgagaacatggtgtcgatgtccggtgcgacgttcccgatcaaggctttgcgccagcagatagcctcggccatcgacgtggtgctgcagctcgagcgccaggaggacggcaagcgtcggctggtgagcgtgcaggagatcaatggcatggaaggcgacatcatcaccatgaccgagatcttcacgttcgaacggcgcggcatcggtgagaaaggcgaggtgctgggtgaataccggcccagcggcatggtgccgatgttccgtgatcgcctggccaagcgtggcatcgaactgccgctgcccctgttcaggccggactggatggaggttacgcagccatgaggcagatacccaccgagtacatcctgatctttctcggcatgatcttcgttgcggtggtgctgctcagtcaagggctgaccatcccggtattcggcgaggccggcaagatgcgcaagcgtatccgcgcacgcttgcgtctgctcgaacacggtagcaacggccccagtgtgcagatgttgctgcgggaaaaatatctgacgcggctttcgccattgcaggcgcgcctggaacagttgccgatgatggagcggttggcgcagatgatcgagcagagcggccacaactacctggcgcatcgggtggtactggccggcctggcgctcgccgtgctggctggagcgggaatctggttcgtcacccagcagtggtggctggcgatggcggccggtgctgcagcgttctggctgccgattggaaagatcaatcgcgaccgcgcggcacgcttcacggctttcgaggaaggcctgccggatgcactggattcggtctgtcgggcgttgcgcgcaggccatccgttcggtgagtcgctgcgtctggtcgccgacgagcgcaagggaccggtggcccaggagttcggcctggtgttcgccgatatcaactacggcaacgacgtgcgtcgcgccatgctcggactgctggaacgggtgcccagcatgacggtgatgatgctggtgacctcggtactcatccatcgggaaaccggcggcaacctgaccgaggtgctggaacgcatgagcgcgctgatacgcgggcgttttcgtttccagcgcaaggtgcgcacgctttcggccgaagggcggatgtctgcctgggtgctggtttccgtgcccttcgtgctggcggcggtgatcatgatgactaccccggattacctgccgatgctgctcaacgaccccgcggggaagaagctcgccgtggccgccttcgtcggcatgctcgcgggcatcctgtggattcgccgcatcattcgcatccaggtctagggggctcgtcatggattacttgtggagcgtgttcaacggcttgatgggcgatgagcgctgggtacgcctgctgtttctggcggcgatcggcatcagcgtggtgatcgcagcgctcactctgaccatgcttgtcgtcggcctgcaggacccggtgcatcgacgattggtcacgctcaagcgcggcatggtcgatcagggcgttggcgagccgccacggggcaatctgcagctgctgctggcgcagctgggggatcggctggtcgccaccgacagcgagcatgccagcggtacgcgcgcgctgttgctgcatgccggttatcggtcggccaacgccgcgcagctgtactggtcgctgcgcctgttgttgccgctgctgttgcttgctgctgcagtggtggtgctgccgttgttcagcgaggtcgagttctcgaccgggctgatgctgacggctgcagcggtcgtcgccggctggatgattccggcgatgtatgtcgaaaagcgcaaggaggcccgcatgaatcgactgcgtgcggccttccccgacgcactcgatctgctggtggtatgcgtcgagtctgggctggcgttgccgcaggcgatcgagcgggttgccgaggagacgtccgtcagccatgccgaactggcgggcgaactggcactggtgaatgccgaaatccgcgccggtgtaagcagctccgatgcgctgcagaatctcgcgttgcgtaccggtctggaagacttgcaggggttggtcagcctgctcggacagagcatccgtttcggcaccagtgttgcggatacgctgcgcatctacgccgaggagtttcgtgaccggcgtacccaggccgccgaggagcaggcggccaagatcgggaccaagctggtctttccgctcattctctgcctgtggcccagctttttcgtggttgccatcggcccggccatcatggcgttggtcaacgccttcgggagttcctgacatgaaaagattcggattgctgctgctcgtatccgcggtgctgggcggctgtcagagcatggggccggatgccggcaacagcggacgctcggtgtactccggcgataacgcactgctctatcaggtgcgcaagcaggcaggcagcgcggagcaggcaatgcagttggcggcgctggcctatcggtcgggggatctcgaccagtccctgttccagtatctgcgcgccatggagctggagcccaagcgccaggacgcacttgtctgggtcgggcgtatccaccgcgaaaggggcaacgatcagctcgccgaactggccttcaccgaagtgctggccaagcagccggacaacctcgatgcgctgactgaaatgggcatgctgagcctgtcgcagcgcgatcaggatcgtgcccgtggcttgctgcacaaggccgtttccctggatcagcggcgtcagggcgtagccattggtgaaacgctgcccgagccgcaggcgctcaaggtcgaccagcagtcgccgctcaggctgtacaacgccctcggcgtgctggcagacctgaacaaccgctttgccttgtccgagggctactaccagctggcgctgaagatcgagccacgctcgctgctcgcgcagaacagcctgggctattcctattatctggccggacgttggcaggacgccgagcgtatcttccgccgcgcgctggatcagaacggcagctactcgccactgtggcgcaactatgggctgctgctggcgcgtacgtcgcgttacgaggaggcactttcggcgttcgagcggatcggttcgcgcgcccaggccagcaatgacgtgggctacgtctgtttggtggagggcaagctggatgaggccgagcagttcttccgcagcgccctggagcagtcgccgtcgcactacctcacggcctgggagaacctcgagcgcgtacggcagttgcgcaagattcggcagctggggttggagcgcgcgcagtcggatgtggtcgccgtggtggatgcggaagtgaaagttttcacggcgccttgaacggcacgttcctcaagggttggtcgcggcggctgcagtcgccgtgctgcgttggcggcgcggcaggtagcgtttgagcctgagtgccggcgactcgatcaggtgccaggagagcactgcggcggcgaggctggcggcgaagctcagcagcatgaacggtaccagcggcaggctgccgtcgctccagtgcatgatcagttgctgcagcgggaaggcaaagatgtacagcccgtaggagaagtcgcctgccttgccgaacccggccagcagcgggatacgcagctgggcaaggtagagcgtgagatagggcagcgtcagtacgtgcacgagctcccagtagtcgctgcgtgcgctgagcagatttgcggcaaccatcagcgcggcgagcttccagttccagatcagcctctggcgatacagatagagcaccacgccggcatagaagaacatcccgagccgcgtggccttgcgcagcaggtcgctctgcacctcgtataccgggatcaggtagaagtgcacgcctaccatcagaaccagcccgatcagcgccatgctgcggccgaacaccttgagcaagccgagcgtcagcacggtggcatacatcaggacttcgtagggcagcgtccacagcgagccgttgaccgtatcggggaaggggttgctggcgaacacgccgggcagccggaactccgtgatgaataccgcgttgccgaggtaggcgaatgtgccgggggcggcaaaatactcgcccagcggcaatcgggtggccagcggtcctaccacgagcacgacgaacagcaccgagacgatcagcgccggaaggatgcgcaatgcccgtttggcggtgaaatccagcacgctgtggctgttcagccatgaaccagcgatgagaaagccgctcatgacgaagaacacgtgcacggcgatgtccgccgagtcatagctgccgctgaacaggcgcagcggttcctgatgcgcctggcctgaaagcccgtaggcgtgaccgaataccaccatcgcggcggcgaaaaagcgcaggaaatcgaagttgttgtctcggttcgccgggatgggcgcggacattggaacctccttgtgggtgtggtcaacgcagtgggaatgtctggctcatccccagcgtgcggctctcgccgtcgcggatggcctgttcgatcagccgcagccgttccggcacctgctggcggcgcgcgacatgacgcagcaggccgaggaagatcagacggttcaggcggtacagccacggcgaagccgcccagacgtgggtgtcgaaccaggcctggttgcgggcggtgtagtaggcacggaagtcggagtcaccgagcaggaaggcttcgtagatgttgcgggtgtgggccttgatgttccacgacagttccagctcgtcgatcagcgcatcggtgaccagccgcaggcggccacccatggcggtgatgcggcgggtgtactcggtgtcgtcggcgtagagcaccagttcgcgcaacggcaggccgatcgcctgatacaggctgcgatgcgcgagcatgccgccgtagggcgcgaacggcaggtcgatggcgcgtggcggcgtccctttcggtcggccccagggcagacgacgccagagcttgtagggtagctgcgcgacatggaagccgaaatagctggagcgcggctggatggcgaagcgtcgcggcacgccgcgagcgatgtcttcctgctggctggggcgaaagcccagcaccgcggcattgtgcaagcccacctcatcgcccagtcgcgccagctcctcgtgcagcaggcgcacggcggaggcggtgggtgcgttgtcgtcatccatcatccagaggtattcggcgccttcttcgagcgctgcctgcaggcccaccgcatagccgttggccgagccggtgttctgctccagcggaatgatgcgcacctggccgggccagcggctggtgagctgttcgagcggtgcacgggaggcgttgctgaccaccaccacgcgggtgatctgctcgaaggcgaaggcctgctcgatcagacgacgcaggtaggtgaggcgatcgccataggtcaccgtgacgatggttgtctggcgcttgaccggcatctcgccggccaggtcggccacggcctgagtttcctgacggtacggttggatacgcgcgtggttgtgcatggcgatgctcctcagccctgttccggtgtggcgagcggcgtgcggtacggctccgcctcgggctcgggtgtttcttccagcggactgaagagggcgtgaaagatgcggatgaaaccgcatgggctgtccggcacgggaatgagttcggtgtaggagtagccatcggccaggatcagcggggatctggcggttccttctgtgctcatgctgtggctcctgggtggcggggcgtgcgaggcccgtgatcagaatgaataacgtcggctgtccgtcgggacataccagaacgagccggaggctggctcgacgacgcggtggcccggatggccaggcggctggctggtggcctggctgccgctggtcgtggtgcagggcgctgaatcgctggatgactggctgtaggcgatcgggctcgggctgccggcgttgtcgcaggccggcgagctgctgccgtgaacgtccggcagggccggatcgatgctcagcgaatcgacgatcaccatggcgctggccgggtcgaccaccagcacaagtgcgaaaccgagggcgcgggtggccctcatccactgctttaccgtgttcatccttgaaacctcgtaaatgcgcgtacatgaatgcctgaatgtgtcgttcaggcttgtttgatcggcaacaccgcagccgggtagagcggggtgctgggctgggcggccgagccgaaatcctggccctcgaaacgggcctcgcgcacgcgggcctcgacgaaggcgcggatctcctgctcgaagcgttcgccggagaaacgctccgagttgctgcggcagttcgccggggtgatgcgtgagtgattcgcttcgaattcggcgatggcggcgatgatcgagttggtcgtctgctccgggtagaacacgccggtcggctctggctgatcgagcccgcgcacggtttccagcacgccaccgcggccgtaggcgatcaccggggtgccgcaggcctgagcctcgatcggggcgatgccgaagtcttcctcggcggcgaagacgaagcccttggcgcgctgcatgtggtgcagcagtacctcgaagctctgatagccgagcaaggtcacgttggagccggcgacgtcgcgtgccttgtccatctccggcccggtgccgatgacgatcaggcgcttgtccggcatcgccgcgaaggcctcgatgatcagcgggatcttcttgtacggcaccatgcgcgaggcggtcagatagaagtcctccttggcctcgtgaagggtgaactggcgggtatccaccggtgggtagatcaccgtggactggcgccggtaactcttgttgatgcgccggccgatgaagtgcgagttggcgatgaactcgtcgacgccgctggcggtgcgctggtcccacatgcgcatgtagtgcagcagcatgcgcgcgagcttggccttgatgccatgttccaggctggcctcgtgcaggtactggtgctgcaggtcccaggcgtagcggatgggcgagtgcacatagctgatatgcaactggttgggtccggtcagcacgcccttggccaccgcgtggctgctggaaatgatcaggtcataggaggacatgtccagctgctcgatggccagcggcatcagcggcaggtatttctgatagtgcgttcgtgccttcggcagctgctggatgaaggtcgtggtggcgcgcttgccgcccaggtgggcgcggtcttcatcgcagaggaagtcgatgacggcgaacaggtcggcgtccggccaaacggcgcacaggctggcgagcacacgctcggcaccggcgtaggtcaccagccaatcgtgaacgatggcaactttcatggaatgacatccttggtcgaaacgaatgagcggccaggccgcaatggggagcgtggtcagcggctgtgcagacggcccaggggtagtacgtcgcgctgtccggtgagccgattgccggcgcgcatcagtgggtgctcgagcaggcggcggcagagcagcgcggctgtgatggccagcgccaggccgaataccgcgctggcgctggcagccagcgaaccgctcagccccagcgtctgcgtcagcagctggcccaggcgctgcatcgccggcagcagcaggtagagcgagcaactgaggctgccgaaccagacgagcaacggcgcccgcaggcgcaggcgaccggtgaacagcaggaacagggcgacggccacggcatagccgagcagctgtcccggccaggcggcctgctgcggcgagccgtcccgcgcccagccggcaacgaaaatcaccggtagcaccaacaggtagacccgcagcgtgtagcgcgcatattcacgggcgcgccggcgggcgtagctgctggtctcgtgctgcacctcgtagcgcagcgaggcgaagaacatcaaagacagcaccagcggcagggtgaccggcagcgtccggtcgatcagctgctgggtcagggccagcagcagtgccgccgcgagcagcaccagggcgcagccggcccgtaggctcacgctgtgcagcaggccgagcgcatgcagcaaaaggcacagcccgtagaacagcagaagcggcggcagggcgccgtaggcgctcacggcctcgaatgccatgcctgggtagtggctcgccgtaccgggcagccaggtcggcaaggccggtagcagcaccgccgtcaggagtaccgccagcagatacaccggtagcaggcgcagcagacggcggatggcgaagccgcgtccgtcatcgccacctgcatgcaaggcggccggcaccagaaagccgcagccgagcagcagccacagcgttgccaccagccagaggtcgatggcctgcgaagagccgggctctgccagcagtggcagcgctacgacatgaacaatcagaaggatggatgcgccgcctcgcagcgcgtcgatgtgcaccaaccgttccatggtctgcctcgtttgacggggggaatgaacgggccaggcatgcgcccggcgctgctagggacgattcgacgaccaggcaatgaaggtcggcggcttgcttctgcccatcagcgtctcgtcgatcagctgggaaaccgtctgcgccgagcgcttccaggaataccgctcgacgttggccagaccgagggtgcgcaggtcctcgcgcagaccggcgtcctgcagcacatggcgcatgcagcgggcaatgtcctcgatgttcagcggctcgaaatacagcacgctttcgccgagcacttcgggaatcgaggccgctcgcgccgcaatcaccgggcagccacaggcctgcgcctccagcggagggatgccgaagccttcgtagagcgacggaaagacgaatgcggtggcgccctggtattcgcgcaccagctgctcgtcgtcgaggcggccgagcatgcgtacccggggattgccttccagccggtagtcgttgccggagaacaccgagtgggagtcgccgacgatgtgcagctccacctcgtcgaagccttccaggctgaggaaggcggcgaccatgcgagcgaagttcttgtgcgcattgggcgacgacacggcgagcagatagggcctgccagctggtggctggtttccgggggcgggtgggcggaacttcgccgacacggcattgggcactacgcagatgttctcgctgggataaccgtagtagcgggcgatctccttgcgggagaaatcgctgaccgtgatcagcgccttgatgcgcttgagcagcagcggtgtgagccccttgtagaaaccgcgaaaggtgcgcgaatagctttccggatggcgcacgtaggtgatgtcgtgatgggtcgcgatctggttgctgtagatcagcggggcggtgttgcacagcgataccagcggcggtcgcccgttgcgtgccagccacagcggcagatccagctgttcccacaggtgaccgcggttgcgtccgatgcggcgtacctgcagccgttcggcgctgccgttcacgggcgtgtcctgaggcgcgacaaaggtcaggtccttgcgcatggcgccgagctccaggcagacctgctcggcgaaacgctgcacgccgcgggtttcctgggtgaggaaacgagcgttgatggcaatcatgagtggctctccttgggaggttgcgtcggtttctcgaggcgaaagcattgactgccgtcggctgacgaacagtggtgaagtgagcgagggccggtcacggccgatcagaaagcggttcaccgtcaggctgaaccgcgaaagcttgatggcgtggcgcgcttggccggcatgccggatcgatggcgtataggcaatgcgattgccttcagccttcttcctgcaccgcgcgcatgctgatgatcttcgggaagccatcgagctttacccgggtgctgcagctgctgcccttggctgtgcatttccattcgctggtggtggtcacccgaccatgctgcggctgtgcggtgtcgatcatggcgacgcgcccggcgtttcctgctccgcttcgcagctcgaccgtacgtggcttgtcggcgctccaggcgaccatcagctcttcctcgtcgcgggcgaagcgcagcatcaccacatcacctgtggcactttcctcgcggccgacaaaggcgtattcccgaacgatcccgctgatggcggcgagcaccgggtaggcgggcttcggcgtgaagtcctgccggaccagaccgaagttgtgctcacgctcggtcttgtcggtgccatcgttgcggaagtcgtaccaccacatgcccttgatgctgggcagcgtcttggcgagaaagaacgcgcgcgccagatacgcggcctgcagcgtctcgtcgatgccgcaggcaccctggtgcgaaggccaggccatctcggtgaggtagagcggcaccgggcgtcccgcggcgcgcgtcagttgcttgtcgacctctgccatccagtcgatccaggcctcgggcgtgttgcggcgccagccgcggcaatgcacatagggatgcaatgacagaccatccaccgactgcatcagcccgttctccagcaggcgcagggcgaaacccgattcgatgccctgggtggtcaccgcgccggccagcaccttcgcattgggggcgcgctggcgaatgatccctgaggcatcggcgatcaggcgggcgtagtcctgggtgaacttcgggtcgcgcgggtcttcgacgtcccattcgttccagatctcgtaatacgccacctggcctttcagctcttcggtgatgaattcgacatagcggttgaacgcggcccggaccggctcggtgcggggtttctcgccgccgccgtggtgctggttgccatagccgaggatgaattgcgtgttcaggccgtggcgagccgtctccttcaagtaacggcgccaggacggctcgatcttcagctggttcggctggcgctcgacataagcccagtgggcgtcggtgcgtacagaggtgatgccggcatcgcgcatcatggcgtaggcgcggccgctgggatcaccccggtgcagctcgtgggcgcagacaccgacgacgaagggttcctcggttgtctgtgcggcgatctgcaaggatgcaccgagcagacccccgagcagcaaggcgtggagcaggggagagcgattcgtcatgtggatcatccgtgatggttgatgctcaggtcaggtgtcgcagttccggcagtcgttgcggggcgaggccgcgggtcggcgctcgggccggtgtcagcacgtgggaaatggccaggccaaggaacagcgtggcggtggtcacctccagcacgtcggtggcccaggccaccagacacaggcagaagacgatcggcagcagcgcgtcgcgcagccttgccccgcgctcgtgcaggcgcagcatcaggggaaagcagagcaggtaaagcaacacgccgaacacgccgagcatcccccacaggtacagcgcggtgttgtcagcgatgaccagcagttccaggcctggcaccgggtaggcgtgaccggcactgcccaccgcaccgaagcccgcgccccaccagccccagccctcgcggagcatgacgccgatgaagttcggccagctgttgatcagccggtcggcgaacgaggcgagcagcgtgccgttgttggccgcattcgggtccaggctcagcaccaggctgatcgccggcagcagcaggccgaccagtaccgcgatgagaaaggctgcggcgctggcgaagcgataggccgtgaagatcagcatcagcagcgtcagcacataggccgctgcggtggacttgttggtggtgagcacgatgccgatcacggcggcgatgtacagcagcagccgcagcagccgcgagcggatgaacgcggcgatgaacaggctgtagaccgcgatcatcaccgacagcgcggtggacatgcgcgcgaagccgccgatacggtcgatgtcgtcgaatgcccaggagcggttggcgctcagctccacctcgccgaccatgtagctgtagcccttccacggcacgctggtcagcagatcgagggcgatgccgacgaagctggcgatcaggcagaagccgatgacgcgccgcaacagcccgagccgcagctccagatgccggccgcagatcaggccgaacagcagtggaatgtagatgaacaggctgaaaccgatgttgtgcagctctgccccatgcatcagcgccagctggctggatgtcaccagccccagcagcaccagccagaacagcggccagccgcggtagctcagcagctccaggctcagcgctgccagacaggcgaccttcggcagatacagcagccaggaaattccggccatgtcgaagtagtagcgcagggcgccggagaaggtttcagtcagcagcagcgaggcgacgaccagcgtcaacaatgtcggcttgtcgaaggccaacggattcgagtcgcgttgccgcggggtgatcagcaggctctggttcatggtggattctcgttccctgaagtgtctcgtgcaggatggactggtactggtccagcatgcgttccatatccagcagcgctagcacactggcccgcgcctggctggcaagtcgctgccgcagcgcgccatcgatgtagagccagagcatggcgatgccgagtgaatcgggatcatcaggcgagcagagcaggccgttgtactcgtcgcggatgatctctggcagcccgcccatgttgctggcgatcaccggcaggttgttggcgcagccttcgacggccaccaggccgaacggctcgtcccacagcgacggcaccaccagcacgtcgatgctctgcatgaactcgtcgctgtcgcagtagccgagaaaactgaccttcttcggatcggccatggccttcagcttggcctcgtaatccagcttgccgcgcccggcgatatccagccgggcgtcgatgtccagccgctggaactgctcgatcagccagccgacgcccttgttctccgaaagcgtgccgatatagccgaaacgcagcggatggttgctgcgctgcttcggcttgctgccctggccgggattggctggcgtgcagttgtgcactacatggcggcgggcgtggctgaagtagccttgcgtggcgatgcgttcgagcacgaagcggctcaccccgatcaccgtagccacctgcgccgaggcgcgggcatggcccaggcggaataccgagcacaggccgcactggcgctggcagctcttgccgtggttgaacatggtgtccttcgggcagagcaggtacaggtcgtgcagtacctggacgatcggcagacccgcggcggtgatttcgtcccaggcggaaatcgaccagccggtgaggttgttgctgacgacgatctccggctgctcgcgctcgatcacgtcgcgtacgtgcaggcgcatgtcggcgttgtagcggtcgcggtagtgccagccgaggcgggcgaggcggcttgggcgctgctgggtgtaatgccagtagctgttcgccagattggcgcgatagacccgcacgccgtcctgaatctgcatgttcaagccggcatccgggccggttgccagcacggctacctcgcaaccgcggcgctgcagcccctcggccagatggcggagaatgacttctgcgcctccgccgatgtgcggtgcgtagaacgcattgagaaataggatcttcatcgttggctcgctgtttgaacctgtcaggctgctcgcgtggccccacgggcacatgcctggctcaggagtagcactggagataacgggtgggcacccggaccttctgttcacgctgcagcaggttgagcaggatgacggagcgctcctcgccgtcgctgctgacgaagatcgcttcgatgtcgctgaagctgccgccactgacctgcacccgttcgccgggtgcgaacgttgccgctggtgcgcttgcgcattgcgcaagacgctggcgcagctgctcgatcagctcgtcgcgaaccggagtcggatggccaccgaagctcaccacgcggctgacgccgcgagtggagcgaatcgggtaccagttgtcgtgaatgcaatccaggcgaatgaacagatagcccggaaacagtgcctcgccggtcctggcgcttggcgtgccgcgtgaaggggacgacgccttgaccggccggtagcactcgaagtgctggcgcaacaggtgttcttcggcgcgggcttcctggcgtggcttggtctgaatcaggtaccagcgcgcggtgttgctaggtgtcatgaggatgtccttcccgaattggcctgctcgaattccatggcaggctgaatgtcttcaagccagcgtcagcgttgcccttttttcgtgaccctcgaccacgctgaagcgcagcagcagttccttgagcgcctcgcggctgttgaacatcagtacatcgatgatcgagagcgagggcacgaacggatgcttgagctgcgtgtagctgatctcatccatgcgcaggaagcgcagcagcaacccgtcagcgcggaagcgggccgggcagtacaggtccatgccgccgatggggttcaggtacagctcgccgtccatgcggtgggtgatctggatgacgcgatcctgcatgtccatccgcgccggcaggtcgagggtggagccgcgatagatcggcgtgcgaatacccaggtaggcacagaggcagcgcagcgagttttcggtgaacagcgccagattgcgctccggatacgcaaggatgctgcggatcagcggcaacacggtgtcgcgctgcggagccttggcatagcagcgctcaagcgttttcatcagcgcctcggcttcgcggtcgaagtcgtcgcagagccagcgttccctgatctgctcggtctggtgccctttgcgcagcgggaaggtgatcagcttgggctggccgttgaccagcacgcggttgcggttcatccacgagcccttcacgtactgcaggtcgtcgcccaggacgaacacatcgctgagggcgatcagctggaaatagcccaggtacggaaagagatagggctgcatcatcgagacggttctgagcacggcgcacctccttgtctggcgatcaggcttgctgggtgttgtaggtgtagtagccgtaggcgccgctgtcatagggcgatgtggacgccttgcgtttcacggcattgaggatcacgcccttgagcagcacgccgttctgcgcgaggcggcgcttggaggcgtcgatctgcgagctggtgctgaggccgaagcgggcgaccagcagattggtaccggcctgctgtgcgaccagcaccgcgtcggtcacggccagcaccggcggcgtatcgatgatgatgaagtcgtagagcttttccgcatcgcgcagcaggcgggagaagttgtcgtgcatcagcagctcggacgggttgggtgcggaaaacccggcggagatgaagtgcaggttcttcacttcggtgcggttggtgatttccgccaggctcaggccgctggcaagggcgtcggacaggccattgcgcggcgccatgccgaacagcgtgtgcaggtagccgcgacgcatatcggcatcgatcagcaacacgcgctgtccggtctgggcgatgacggcagccaggttgctggacacgaacgacttgcccaccgacggggtggggctggtgatcatcagcaccttgttgcgtgcttcgagcatggcgaacttcaggctggtgcgcaggctgcgcagcgactcgacagcgagatcggtcggctcggtgaggctgagcaggcgagtcttgccgtcgcgagacttgcggctgcgattcaactgatcctgagaggcgctgtagggcaggccggcatacaccggcacaccgagcttttcgatcgcatccggactttccacgccgcgatagaacgcctgacgcaacagaatcaccgcggccgaaacaagcaggccgacaaagagcgcgatagccactaccagcgggcgaaccggcttggatggtttctcgaccatcgagtaggcattgtcgatgatacgcacgttgccgatggtgccggcgcgcagcacatcctgctcctgggcctgattcatcaacagcgtgtaggtctgggtggtgacttccatgtcacgcttgaggcgcagcagttcctgctgcgtcatgggcagggtgtcgaccttcttcagcagctgcgccttctgcgcctgcagctcgttcatctgcgacatcagggtgcggtaggtcgggtgctcgcgggtgtagagccggtcgtagtccacccgcttgagtgtcagttccgacagctgggtttccagctggacgatctggtcaagcacgcccttggtctcgatgctgatgtccaccgacttggagctggtctggtagtcgtgcagcgcggcttcggccttctccagctccttgcgtacctgtggcagctgcgaacggaggaaatccaggcgctgggccgcctcggcagagctgcgctggatgttctggctgacatacaggcggctgatctcgtccagcacacggctggccagctgcgggtcgggatcttccagcgacatgtagatgatccccgagtccttgccggcctcgccgaccttcaggcgatcctgatagtccagcgcggtggtctgcggacgattcctgaccagtctgaactcggtgcccggacgagcctccagttcggcgatctgcaccttgaagccctgggtttccacggcctggttgacctggccccggaggatcagctgctgctcgtcgtcatacaggctgtagttaccggccgtgccggcgaccaaggtgagctccatgcccagataggcttcgggtacgtcgagctggaagacgtcgagcttctcgccgccccaggcaaaggcggtcagcccgaacaggggcttggccagcgcgccgtcggttgccgggtcatgctgacgggccatgtagccgccgatcagcggaaactggcgcggcttggcgacgatgtagagcttgagttcctcgacggccttgccgagcaccgcgcgggatttcagcagggaaatttcggtgaccgcctgggaaaccgagtccgggcggggagatatttccggtatgccggtaatggcggccttcttcggctcgatctggatcatcgcggtggcctggtagatcggcgtggcgatgagggcgtagagcacgccgagcacggtgaacaacccggtgatggcgatgatcaacgccttgtggtcgtaggccgtgcgcatgatgccggccaggtcgatgcgattgtccgcatcgtattccagtgaagagcgggtcagggcagtcattgggagtccttcctcatggtgcgtgtatgcaagatggcggttgggctgatcagctcctggccagccgtggactcagcctgcgcagcaggttgagcgtgatgttctgggcgatggtcgagagtgcctggagcttgctgaacggcgagaccagcgagaggcactcgccgaacacctggaccaggaaatactcgtagagcgcgttgttgccgatgcggtggtagtagcgcgccaggcagtagtgcgcatgcatcgccatctggatgcgctgcttgctcggccgcatggagaagattccgccttcgtgcacgcggtatgcggccgggctgatcccggccatgaacttgcccttgccgtaggcgccgagcagcgaccaccagcagatatccagcacttccacgccgagcagctcaggcggcagttcctggaccaggttgcggaagcacaccgtgagcgtggaaatcgggcggccctgcatcagttcgagggcggtggcgtccttgcgcagctttccggtgagctgcgggctctggatgatgcccttgctgttgaacatgaaggcgtcgtggtaggtgatgacgtagtcacgatgctgttcgaggaaatccacctgctgttgcagcttgctcggatcggtccagtagtcgtcgccttcgcaataggcgatgtacttgccggctgcccgggcgaacagccgcgtactgaacggcacgccgagactgaactggttctgcgtctggtagatcggcttgatgatgctcgggtagcgcgccgcgtagtcggcgatgatcgcggcggtggtatcggtcgaggcgtcgtcgtggacgatcacctcgaaggggaaatccgtttcctgctggagaaagctctccagcgtcttccgaatgaaagaggcatggttgtacgtcaggcaaacgatgctcagcagcggttcggtcttgccgccccagcgttcaatcaaggcttgctcgctcttcaattccatttttggatgctcgcttggtgatgagtagatgaagcttgagtagcagtgatttcgatgtcgccgcgaccagcagcaggcagacgaacccgcttatggccagcgccagcagaatgtcgaagcggttgtcgctgacgatcagcaggaacagcggctcgcccagcgccacgccgatcacggtcgcggtggtgattcgcaatatgtctcgtacccagatgccctgcaggccgggcgcgaagcgccggtgcaccagcggcggccagatcacgaaggtcgccaggcgcaggatgaaccacgccagtgcggcaccgtaggcgccgtgggcaagcgctgcgtagatcacgatcggtacgctgatggcagtggaaaccacgctgtaccagatgtgcaggcgcagctggccgtaggcgtactgcaggtagaactggaaggcgccgaccgccatcagcgcgctgcccggcacgtaccagaacagcatccgctcgctccattgggctgcggccgcgtcgccggtccaggcaaagatcagcgcctggccgtgccaggcgatcaccgcggccatcggaaacagcacgctgcagacg

SEQ ID NO: 88 - DNA, 28043 bp, Unknown
  From metagenomic library of CO182
atcaacgcagattgatgatggtctgggttaccgcatcctcggtctggatggtcttggcgttggcctgatagttacgctgggcaacaatcaacgccaccaactggtcagacaggttgacgttggactgctcaagcgcacccgactgtatggctcccaaagtacccgtggtcggtttgccgaccaccggctcacccgaggtaaaggactccgcccatgccgtcttgcccagcggggtcagcccctgctggttggggaagctggccagtgcaatctgcccctgtacgcgcgtctgtccgttggtataacgggcaaagatgatgccgctgtcgtcaatttccaggccggccagatcccctgtagtgaagccatcctgagtcaccgagctacgcgaaaacactgcggcatactgactggtgccggtgagatcaatacccagccgcgccacaggagacgtggcgccagtaggctgaccattggccgacaggggaacccagccattcagctcatagggctgggcggtcgtcaactggcctgcattgttgaagctcatcggaaagcgtgacgctgcagagggtgtataggccgggtcagatgccagcacaccggtttgcggatcacgcccgtcaatcagcgcaaccatctcccaggcaccaggccctgtcttgataaagtacttggtcatcacgtgcggattaccaaggctgtcgtagatatccaccgaagtcgagctgttataggacgacgaatcagtcggatcaaaggaggccgcagcagccgtcagacccgctgtttcagcggcagtgatttcagccggcgtggggttggcaggatccgcggcgccagcaatcgatgccgcataggcctggtcatagctctgctgccacagcaccggctgcacattggtcgaattcagattaagtcgcgagcggatttcggtggtagcctgcggttctgcagcccgggtatctatctgcatatcacggcgaacgccttcgctgatgtcgccggtgaccggatccaccccaaacccctgcaggcgctcaccaaaattattgacgatattgccttctcgatcggtgccaaagtacccggcacgggtaaagctgatcgccccctgattgctggtgataaagaagccgttaccgttaatcgccagatccagtgtgttctgggtaaagtcgatattgccctgggtgaactgctgcgacacactgcccagttgcacgccgctgccctgggcattcttgccggtacccaatacagaggcagcgtacacgtcggcaaattcagcccgtgaactcttgaaaccgatggtacctgcgttggcaatgttgttgccggttacactgagatcggtggacgctgcgcgcagaccactcaaaccgatgttgaaggacatagtgtctctcctgtgtggttaatcgcccaagcgagcttatttgccaatcatctgcacgctggacagcgccatgctgccgatgcctgcgaggtttagaagcatttcaccgcccgtagcggacggcagggatacgctgtctacattggccggcaaaagggtattcagttgacggttgccgccctcaaagctggcctccaccttgaagctgtacatgcccggcggcaacaaatcacccgagccatcccgcccatcccaggaaaacgcccgggtgccggcttgaacattgctttgactagcttggtgcaccagagccccgctttcgtcgtagacgctaatcaaaacattggcactggaggctggcagcacatagtcacctttaatacctgcctcggtatccaccatggccttggaggtcggcacaatcaccgaacgacccaccatggatgaggcctgcagcgcctgggacgactggaaggcgctggccagattatccagccccacccccattttctcgacgccctccacggtgctgaactgcgccaactgcgcaataaactcaccgttttcctggggtgacagcgggtcctgattgttcaactgtgcaaccagcaattcgagaaactcgttcttgcccagctcgccacccttggcaaagcgaccctggtccatctggtagttatccagtgctgaagcaccctgcgtattgattccgatagacattttgcctgctccttattgccccagcgtcagtacgcgttgcatcagcgtcttggcggtgttcatgagttccacattggtctggtaagcccttgaggcggccatcatgttggccatctcctccatcacattgacgttgggcataaagatgtagccttcttcgttcgccatgggatgattagggtcatagcgcatctgcaattcagcgtccgactcgacaatgcccaacacctgcacaccctgacccgcctcatcatgcggctggaacaaggatccctgccccatgccctgctgctcgctgaaaacagttgcaaacagcgggttgcgtgcccggtaggtctgatcaacgctactggagacggtctcggcattggcgatgttgctggcaacggtattaagccgcagcgattgcgcactcatgccagagccggcgatattgaaaacctggttaagcgacatggtcagtctcctctcagggctgtcatcagccccttgaacttgctgttgaggaaggtgaaactcgcctggaattgcgcggcattctcggcaaaacgtgcctgctcggtttgggtgtccacggtattaccgtcgatagccggctggctgggcacgcgatatcgcagcccggcagcctgatcgaccagactgtccgtgacgaaatgctgctgatgggtacgctgcataccaacaccttgcgtgcccttgccctgctgggcctcaagaacggcggcaaaatccagatcacgggccttgtaattgggcgtctcggcgttggccagattgttggccagcacggctgcccgctcgctgcgaaacttcagcgcgctctcgtgaatccccaatgccttgtcgaaactgatgctcatgacaatcatcccctactgaccgaaaacggtcggcgttattgcacaagcaagctaaagcaatctccatgccaacaaataatcacttataaaacaacaagttatcaaagactggaatttgacgcggcaagccattgccgcaaacaccggggtgtcgctgccggcaatgcgcccgcggtggtaagataggcaccttttcatccgaacactcaaaggactccattacatgtgcggaattgtcggcgccatcgcgcaacgcaacgtcaccccgatcctgctagaggggctgcgccgcctcgaataccgcggttatgactcggccggacttgcagtactggacgccgagggccatttgcagcgcgcccgcgccatgggcaaggtaatcgagctggagaacctgctggacgccgagccattgcaggggcatatcggcattgcccacacccgctgggccacccacggcaaaccggcagagcgcaatgcccatccgcaccagtccggctcgattgccgtggtgcacaacggcatcatcgaaaaccatgccccgctgcgccagcgcctgcagtcactgggctaccagttcagttcggataccgacaccgaggtcattgcccacctgctgcaccaccacctgcaacaggggcaggacatactgcaagcactgcgtgcgaccctcgccgagctgcatggcgcgtatgcgctgggtattatccacgaggccgagccggacactctctattgcgcgcgcatgggcagcccgctggtgattggcgaaggcagcgaagagcattatctggcctccgacccgctggcgatgctgcaggtcaccgaccgcttccgctatctggaggaaggtgattacgcccgcatgggcatcaaccactgccagatctgggatcgccagcaccagcctgccgatcgcccggtacagcgttacgagcacgccgcgcacagcctggacaagggcgaataccgccactacatgctcaaggaaatgttcgagcagccgcaggcggtggctgacaccctggccggtacgctggccgatgaccatgtgctgactgccgtacttggccccgaagccgaaacgcggctggccgacatccgccacatccacattgtggcgtgcggcaccagctaccatgccggcctggttgcccgctactggatcgaggaaatggccggcattccctgtcaggtcgaagtagccagcgaataccgttaccgcaccgtggtggtcccggacaacagcctgctgatctgtatttcccagtccggcgaaaccgccgacaccctggcggccctgcgccacgctcgccagcttggctatctgggcaccctggcaatctgcaacgtggccggcagctcgctggtacgcgaggccgactggcgtctgctgacgcatgccggcccggaaattggcgttgcttcaaccaaggcctttaccacccagctaactgccctgctatggctgaccacagccctgcttcaagtgcgtggctgcgaccagccgcaggtagccggcaatgtcagtgccctgcggcgtttgccgaccctgattgagcaggtactggggcttgagccgcagatagtgcaactggccgagcgctttgccaacaaacaccacgccctgttcctcgggcgcggtagccactacccgatcgccatggaaggagccctcaagctcaaggaaatttcctacatccatgccgaagcctatgcagccggcgagctcaagcacggaccgctggcactggtagacgaagatatgccggtggtcagcgtggcacccagtgacagtctgctggaaaaattgctgtcgaatctggaagaggtacgtgcacggggtggccagttgatcacctttgcctgcgaaaccaccgaacagagatccgacgccaaccacaccattatcaacctgccctgggtcgaagactgcatttcgccactggtctacaccctgccgctgcaactgctgagctaccacgtggcactggtcaagggcaccgatgtcgacaagccgcgtaatctggccaagtcggtcactgtggaataaacaggggaaggcgcatggcacaacgcattctggttaccggcggtgctggctatatcggcacccatacctgtatctgcctgcagcaggccgggcatcaattggtggtactggacaacttcagtaacagcaaacccgaggcactgcgccgggtcaggcagatcagcggccagccgctggcactgatcgagggcgacattcgcgatcgcgccctgctcgaccagctgtttgaggaacagtcgatagatgcggtgattcactttgccgggctgaaggcggtcggcgagtccaccgcccagccgctgcgctactaccagaacaatgtcgcaggcagtctggtgctgttcgaggcgatgcaggcggccggggtgaggaatctggtgttcagctcgtcggccaccgtgtatggcgacccggcgagattaccgattgacgaagactttccgctcagtgcgaccaatccctatggccgttccaagctgattatcgagcagatgctgagcgatctgttcctggccgatccgcagtggaatattgccctgctgcgctatttcaatccggtcggcgcgcatcccagcggactgatcggcgaggacccgaacggactgccgaacaacctgctgccatacatctcacaggtggcggtagggcgtctgccgcagctgcaggtgtttggtaccgattatccgaccgtcgacggcaccggtgtgcgtgactatatccatgtgatggatctggccgaggggcatgtggcagcactggactggctgggccgcaaggcggggctgcgcgccttcaatctgggcaccggccagggctattcggtactgcaaatgctgcaggcctttgagcaagcctgtggccacagtctggcctggaaagcggttgagcgccgcgccggcgacgtcgccagctgctacgccgatccgcaacgggcggaaagtgaactcggctggaaggccacccgcaccctgcagcagatctgcgatgacagctggcgctggcagtcaggcaacccgcaggggtatcgctaagtcgataccccgcagcggcgcccgtcagccggccgccgccagctcaatctccgccagtcgtttttcccaggccttggcttccttcttcgaggtaccacccagcagctccagcgcctgacgcaggcggtagcgggtcaggtccgggccgaggtgggccatggcgtccagcaccgataccgagctggcctgaccggtgatggccgggaacagcagcggcatcacgtcacgcagcttgacctcgaaaccctgggcaatcagctggatgcaggcggtgatgccgtccttgtcccactggcgcagcgcctccagcttccacagcagcagttgcagcagctggcgtacctcgtccgggccgagcttcttgtgggcaaacagcgtggcatccggcgccaccgggccactgaggaagaagccggccagcggcaacagctcgctgaacgtctcgacccggctctgcaccagcggcaccagcggcttcaggtagtcggcattcagcgcccaggcctgtaccgcacgggcaaactcatcggtgcccagttcacgaatccacagcccgttcagccaggccagtttctccacatcgaagatcggtccgccgagcgatacacgctggatgtcgaagtgctcgatcatctcggccagggtgaacttctcgcgctcgtcgggcatcgaccagcccatgcgcccgaggtagttcagcagcgcctgtggcaggtaacccatgcgctggtagaaggtgatgctggtcgggtttttgcgcttggacagtttgcttttgtccgggttgcgcagcagcggcatatggcacagctgcggcatctgccagccgaaatactgatagagcaactggtgcttcggcgccgagttgatccactcctcgccacgcagcacatgggtgatctgcatcaggtggtcgtcgaccacgttggccaggtgataggtgggcagaccgtcggccttcatcagcacctgcatgtcgacctgctcccagggaatctcgatctccccgcgcagcatgtcgttgaccacacagacgccctcggacggcactttcatgcgcaccacatgcggctcgccggcagccagtcgctgcgccacctcggtcggagccaggtgcaggcagtggccgtcgtagccgggggtctgcttgttggccatctgttcggcacgcagtgcgtccagtcgttcgctgctgcagaaacagcggaacgcatggccgtcagcaatcagctgctcactgtgctgctggtaaatggcgctgcgctcgctctgccggtaagggccgtgcgggccgcctacatcaggaccttcgtcccagttcagtcccagccagcgcagcgattgcaggatctgctgctcggactcggcactggagcgcacctgatcggtgtcttcgatgcgcaggatgaactggccgccgtgctgtcgggcaaagcactcgttgaacagggcaatgtaggcggtgccgacatgcgggtcaccggtcggcgaaggggcaatgcgggtgcggacggtcatggagtctctcgatctggtccgaccggagcacaactgctccggcctgtaattacggggtgaaatcttaccgcgccagcccgtcatcctccagtgcgcgcgcctgcatctgctgctcaagacgggcgatcatgaaatcgataaaggccttgaccttcatcgactggaaacgacgcgagggatagagcgcatagagctcggccgtgggtagccgacaatcctcaagaatgcgaaccagctgcccttcttcgaccagcggctcggcgatgaactccggcacattgataatgccagcgccctgtaacgctgcctcgcgggcaaaggtaatgttattgaccgtgagcaccggcgtgatggatacgctggtatcagggtcaagaaactgccacttgcgcagcggctccacgctggtatggatgcagcggtgcgcggacaagtcagccggtgttcgcggtgctccatgccgtgcaacatagtccgggctggcatacagccggcatggagtggataccatgctgcgcgccaccagactggagtcctgcgggcgaccacggtggatcaccacgtcaaagccctcttccaccggatcgaccagccgggtagtcagctcgatatccacctggattgccggatagcagcgcataaactcaccgacggcggcaccaaggaacagttgaccgaactcgattggcgagctgatccgcagcaacccggtcggttcgctctgcaaatgcatgatcgcctcttcagcctcggcgaactcctgcatgatctgccggcagcgttcatagtaggcctgacctacttcagtaagcctcagcttgcgcgtagtgcggttgagcaggcgtacccccagccgctcctcgagctgtgcaatacggcggcttacagtggatttctgcatgccaagcgtcactgcggcactggtgaaactgtgttgttcaaccacccgggtaaagatcagagcgtcatccaatcccatgccaactgttccttcgatgcaacaaagtgtggcgattctagcgcctccggcagatccggcaacagtgctagagtgcccggacaatcagaaaaacggaaaaactcatggcttcccgcacccgacttcgcctatttctgtttttgcttgtgtgtgcgcttgccgttgccagcttcactgcccactggtggctggtcggacgccactaccagagcaccagcaatgcctatgtgcatgctgagatcagccgggtcggcagccagttggctgcccaggtaatggaggtgctggtcgaagacaaccaattggtcgaatccggccagttgctggtgcggctggatgatcgcgactttcggctggcccggcaactggctgaagccaacctgcaaacccgattggccgagcagcagcaggtgcgcgcccgactggctcagcaggacagccggctggatggggcgcgtgccgaaattgacgcacaacaggccgagctgcaacgcctgcaacgcgacctggcacgcctgacaccgctgcgccagtccggttatgcctccgaggaacaactcagccacctgcaggcccagcagcaagtggtgcgtgcccgtttgcgcgccgcagaggctgaactgcgcacccgcgaactggacaacaacggcatgcaggctgagctgcaacgcctgacagccctggaggctgcagccagcgcagaaatccagcacgccgagctggccattgaacgcagcgagatacgcgcggcagtcgccggtcgcatcggccagcgcagtgtgcgggtgggccagcaggtgcaggtcggccagcaactgctggcgctggtgccggagcagcagctgtgggtgcaggccaatttcaaggaaacccagatccgtcgcctgcgccccggccagcgcgtacgcctgcaatttgatgccttccccgacgagccgctggacggtgtggtcgacagcctgttcccggccaccggtgcgcagttcagcctgttgccaccggacaatgccaccggcaacttcaccaaggtggtgcagcgcctgccggtgaagatcctgatcgacccgcagcatccgttgcggccgttgatccgcccggggctgtcggtgcaggtacgggtcgacctgcgtgactgagagctaccgcgagccagccattccgccacccagccggcgcgactggattgccattctcagcgcgattctcggcgcctttatggcgattctggacatccagatcgtcaacgcctcgctgaaggatatccagggtgcgctgtcggcgaccatcgaggaaggctcgtggatttccacctcctatctggtcgccgagatcatcatcatcccgctggccgcctggctgtgcatggtgctgtcgccacggcgctttgcagtcatcatctcggtggtgttcgtgattgcctcactgctctgctcgctggcctgggacctgcaaagcatgatcatcttccgcgtgctgcagggcttggccggcggcgcgctgattcccttcgccttctccctggtactaaccaagctgccgctggaggtgcgccccaagggcatggcgctgttcgccatcaccgccacctttgccccgtcgattggcccgaccctgggcggctggctgaccgaaagcttcggctgggaatacattttctacatcaacgtgctgcccggcgcgctgatgatcgccggcctgatgtatggcctggcaccccaggcgccgcgctgggagctgctgaagaagggcgactatgccgggattgtcagcatggccatcgggcttggctgcctacaggtgttcctggaggaaggcaaccggctggactggctggattcaccactgatgatctggctcggctcgctggcgtttgtcagtctggggctgtttatcattctgcagctgtcacgcgacaaccatctgatcaacctgcgcctgcttggcgagcgcaacttcctgcttggcagcctggccaatgtcgggctgggggtcgggctgtatggcacggtgtttgtgttgccggtgtatctggcgcagatccagcagtacaacgcgctgcagatcggcgaggtgttcatgtggctgggcctgccgcagttgctgctgatcccgctggtgcctgtgctaatgcgctttattgatgcccggctgatctgcgccgccggctttgtactgttcggcagcgccagcctgtacagcgcacaactggatctcgactttgccggaccccagttcattgcgatccagatcttccgctcgtttggccagccgatgattctggtgccgctgtcgatcctcgccaccgcgatgattccgccgtcgcaggccggctcggcgtccagcctgtacaacatcatccgcaacctcggcggtgcgattggcattgccgcactggcaaccatcctcgacagccgcagcagccggcattacgagatgctgcgcgagcacgtcagcccggagcgtccggaggtgattgagcggctgcaactgctgacccaacagcttggcgacccgcaggcggcgctgcagctgctgatgcagcaggtcgagcagcaggcgcggatcatggccttcaatgatgccttcagcctgatcggtgtgatgctgctgctgtccaccgtctgcgtgctgctgacccgtggcttgccgattcagcgcaagtaaccttcccttgcgcctgccatggcggctcatggattgcttcggccctgcgggccttccaatgacggctgtgtaataccgggcactcgccacacccagcgaatgtacatttttctgcccacctactggcaataacacctctacagcgctagcatcaggccttatttgtaaaaaatatcaaacaaatccgaactgacaggagtgcgccatgctcaccgaccacacgggttcctattacgctgcatcggccaatccgacccctcagcgcccgccattgcaggggctggtggaagccgatatctgtgtgattggtgccggctataccggtatctccaccgcgctgtttctgctggagcagggtttcagtgtgcgcgtactggaagcggtaaaggtcggctttggcgcctccgggcgcaatggcgggcagatcgtcaacagttacagccgcgacattgatgtgatcgaacgcaccctgccggcgccacaggcacgcctgctcggcgagatggccttcgagggcggacgcatcatccgcgatcgggtacagcgttacggcatccagtgcgacctgaaggatggcggtatctttgctgcgctcaacccgaaacagatgaaacacctgcagacgcaaaaggcgctgtgggagcgctacggctacaaccacctggagatgctggatggcacagatatccgccagcgggtcgacagccagcgctatgtcggtggcatgctggatcatcagggcgggcatatccacccgctcaatctggtgctgggcgaggcagctgccgttgaatcgctgggcggggtgatccatgaacagtcgccggttatccgcgttgaaccgggcgagcgaccgctggtgcataccgcccagggccaggtgcgcgcgcgctttgtggtagtggccggaaatgcctatctgggtggactgataccgcaactggcggccaaatccatgccctgtggcacccaggtgatcaccaccgcaccgctggatgaggggctggcgcgcagcctgctgccggaggacgactgcgtcgaggattgcaactacctgctggattattaccggctatccgccgaccgccggctgatctacggcggcggcgtggtctatggcgctcgcgatccggccaatgtggaagcgctggtgcgccccaagctgctgaagaccttcccgcaactggccgatgtgaagattgactatgcctggaccggcaacttcctgctgaccctgtcgcgactgccacaggtcggccgtatcggcgacaacatctactattcccagggctgcagcgggcatggcgtgacctacacccacctggccggcaaggtgctggccgaggcgctgcgcggccaggccgaacgttttgacgcctttgccgcgctgccgcactacccgttccccggcggccgcctgctgcaggtaccgttctcggcgctgggtgcgctgtattacaacctgcgcgaccggctgggcatttgacggcaagttgccagcgcagaccctgacgcattttctggctataattagcgccgaaaccaacaatacggagaaccaccatggaaatgatccgcaccttgcgcaagagcctgtcgattctgatgaccgcgctgttcctgatcaccagtctggccagcattcaggcccaagccgggatgatcggtacccatgaactgattgccgaacagcaggtacagatggatcgtcaggatctgcaggcgatgctggaggatgatcaggtgcgtgagcgcctgcaggctatgggcgtgaccgccgagcaggtcgagcagcgcatcaatagcctgaccccggcagagctggcgcaattcaatgccgaactggaaaaggccccggccggtgccggcgtggttggtgtgattgtgctgttcctgctggtcttcatcgttactgacatgctgtgcgccaccaatatctatagcttcgtcaactgcgttcgctgatgacatgggcaataccagccgccgtacaatggcggccggttctgctgttggcctggctgttatggctgagcggttgtgccgtccagccacagacagccttgatgcatgaccccgcactaccctcccgtactctgctcaccgatgtgcctttccatgcccaggacgattaccagtgcggcccggcagccctggccatgctgctcaaccagcgcggcattgaaattacccctgagcaactgaccgaacgggtctggctgcccgagcggcgtggcagcctgcaactggaaatggttgccgccgcccgagaacaggggcttctggtgtatccgctggcaccccgagcggaatcactgctgctggaattgcaggccggcaatccggtattggtgatgcagaaccttggctttaactggtggccgcagtggcactacgcggtggccatcggttacgacctgccgcgccagcagatcatcctgcacagcggcctggaagccgaacgccgcgaaccgctacgcctgttcctgcgcagttggcaacgcgccgacaactgggcccgcgtgctgatgccgccggagcaattgccggccaacgccgaagccctgccatggctgcgtgccgccagcgatctggagttgagcggacagccggctgccgctcgtagcgcctaccagcgcgctattgagcaatggccggagcagcccgctggctggttcggtgccgccaacagcgcctggcaactgggtctgcagcaagccgcaattgaggcttacctggaagccctgcgacagttccctgacctgcagcaagccaggcacaacctgatcgcggcattcacagccatgggctgtccgcaacaggcaaatctggccagccagccagatgccgtaaacttgctgcaacatattgatttgcaagcatgccacacgccttatcagcctttgttgccctgacagaaacactcaattgcacgaaggctattgccatatacccctatataggcaagcctttctacctgcaacgggtaatcgacatgtgccaatctgccgcaccaaaaaaagccggaaacgtcacatttcttgatctgtgttaaagcgggactctccaaaaagtaacaaattgcaagcgtgtcaacacaaacggcaaaaagcctgcaaggagaacccacaatgcacacacccacgcttcgcaaaagccacagcccgttgctggcagctatgctggtcggcggcatggctgccagcagcacagcagcaatcgcttcccagccaactcttgaaaaagagcagttcgaccgcgccaccctgctgtacttccagcagtgtgccggctgtcacggtgttctgcgcaaaggcgccaccggttccaacctcgaacccgaaaacatgctgaaactcggccagcagcgcctggagcgtattattgcgctgggtaccgaaggcggcatgaacaacttcgacaagatctactcgccggaagatatttctctgctggcaacctacatccagatgacaccgccggtaccgccggagctgtccctggcccagatgaaggaaaccctgaagacccacgtaccggccgaccagtatccgaccaagccgatgcacggccgcaactggaagaacttcttcctgacgatcgagcgtgaccacggttcggttgcagtgatcgacggtgacaagaaggaactggtggcacgtatccccaccggttacgccgtacacgtgatgaagggcgtggaaaacaacaaggccgtcaagcatccgaagcccgaagaagtcggccgcttctggtacaccatgggccgcgacggcaagatgaccaagatcgacctgtggcagactccggacaagatgctggtctccgaagtgcaggttgcttatgacgcacgtgacgtagctgtttccggcgacggcaagtacgtcatcggtggcggttactggccgccgcacttcgctatccttgacgcccacaccatggagccgctgaaagtggtttccgcccgcggtgttaacgtcgacggcgaatacgtcaacgaagcccgtgtcgcagccatctacgacaccccgcacgcaccgacctggctggtcaacatcaaggagctgggccagacctggcaggttgactactcggatatcgacaacctgcgcatcgagatgatcgacaacgccaagttcctgcacgacggtttcttcgatccgaccggtcgctacttccagatcgctgccaacggctccaaccagatggtggtgatcgatgccaatacccgcaagctcgaagccatcatcgacaccgacctgcgtccgcacccgggcccgggcgccaactggatcgacccgacctgtggtccggtaggcggcaccccgcacctgggtgttggcaagatgactgcctggggtaacgatccggcaggcaacaaggatcatgcctggaagatctgctacgaagttgaaactgacggcccgggtctgttcatccgtacccacccgaagagcgactacgtatggatcgaccagactctgcacccggagcctgaagtacagcagtcggtcaaggtcatcgacaagaagacccgcgaaatcgtcaagactatccgtctgaccgaaaccaagggtcaggtagccactcacttcgagttcaaccatgacggcaccgaagtatgggcttccgtctggaaccgtggtgacagcctggcgccgaacggcgagatgatcatctttgatgccaagacactgaaggagaaggcgcgagtcaagggtctgtacgccccgactggcaagttcaacgtgttcaaccgcaccaaccacgtgacctgatccatcagggccacagttcggccgggctctgcccggccgaaccggttggctaatcagacaggagtcacacccatgcaacgaagacattggctggcagcgctcggaatctcactgatcgccacgccacttgccgcagagcctgacagccgccagcaggaaatggtggatctggcctggaagcgtggctgtttcaattgccacgatctggacaccactctacgtggtccagcctggcgcgatgtcggcgaacgctatcaggacgattccgaagcactcgagcgcctgatacccattgtccgcaacggcgggggtggcaactggggtgacgagttcatgacagccaatcgacgggtccccgaagaggatatccgccaactggtcgaatggattctgacactgagaagcaccgaatcatccgttcagaactgaattacagagtgcccttcaaaggcaccgaaccattgccgcaccaacccaactgctccaagcgagctttgtgaggaatgccatgagtgaccagcgaacctcccgtctcaagggtctgctgaaactgcttcgaagccccacttcgaaattttccctgggctctctgctgatcgtcggctttgctgccggcatcattttctggggcggtttcaataccgtgatggaatggaccaatactgaaaaattctgcatttcctgtcacgaaatggagaataacgtctataaggaataccagcacaccatccactactccaaccgtaccggcgtacgcgcggtctgctcggactgtcacgttccgcaggcctggggtccgaagatgattcgcaagatccaggcttcacgcgaggtctggggcaagattaccggcaccatcaacacgccggaaaaattcgaggccaagcgtctgaccctggcacgtcgcgagtggaaccggatgatgaagaacgactcgctggaatgccgcaactgccatgactttgtcagcatggacaaggaagtgcagtcaccacgcgccaagcgcatgcatgaacgcgccgtggctgatggcatgacctgcatccagtgccaccagggtattgcccaccagctgcccgatgacatgaccgatgatgattatctggattgacatatcgcaaccaaaaactgcgaactgacaatcagccgaggagaagaacccatgaagaaactcactgccgcgattatcggcgtcacccttggcctgagccagggtgttgccgttgccgaacctgctgactggagcgccatcgaagccaaggaaatcaccctgttcttcccgggcatttccccgatggagtggattaccggcaagatccgtatcgatcgcgcccgtcatggcggtgcccgcccctttgcccagggtgatacctgtatcgactgccatggccaggaagtggccgagatgggtgccaagattgcctcaggggaaacccttgagccggatccattagctggacgcccgggctccatcccgctgaacgtccaagcggcccacgatggcagcaacctgtacatgcgcttcagctggacccagccggcagctgccggtggcgacaaggcagatgctgagaacccggtaaagctggctttcatgctggatgccggcaaagttgagacagctgaccaaagtggctgctgggccagctgccacgctgattcgcgcaccatgcccgaaggtgatgccggcaagaccaaatacgtcaaggacggatcggttgcagcaggggtgttctacgatctggtgcaatggcgtagcggtagcaatggcggatacgccggtcatgttgccgatcagcgcgttctggaagccagcgacactgttgttgccagcggctcgcaggatggcgatacctggtcagtcgttatccagcgtccgctggctggcggcgaagctgatatcgcgctggaagccggcaaggcatacaacgtcggctttgcaatccacaacgagcacaccgaaggtcgcttccaccacgtatccctgggctacaagctgggtatcgatgctgacggcgacatcactgccaagaagttctgatctacccgcgccaacaaaaagcccgcacatgtgcgggctttttgttggccacgatatcttaaagcgccctatcaataaccagcgtcaccggctgcaaggcacccaccagcacatcatcgatagccccctcgtgagtaccagccatcacattgccagccggtgccagtctcgccaccagctccagtcgttggccggtatacaactcaatatccggctgcatggcgtcagtcagatccatctcgatgtctgatggcagattatgcggatcaagcctgcgtgccagcagtagccgcggtctggcatcaccgtcagccgcttcgcgggcaaatacgaataccgacgagtcaggaccaagctgtgcttgcaatgacgcgtccagctctacccgcaagcgaatcaccggttcatcgccgaggcccgcggtttgcgactgcaccagcagttggcgggcccggtcaatgcccaggcgaatctcgccggcttctgcactaccgggctccaacagttccatcaacgcctgccaacggcgaattgccgcatcgtagtcaccttgctcgaaagccgccacgccaagcaaactgagtgcagaggtttcatcaggctgcagctccaatgcccgttccagcatggccacaccgatatcgtcaaactggtaatccgccgcgacaaagcgtgattgcgacaacgccgccagaacctgcgcatgctcgccaatcagatccagcgccttttccagcgcaatcaccgattcatgggcctggtcattggccagataggcctgacccagcataaaccagacctcaccgttatccggctgcagcaccaatatccgctccatgcgagaaatagcctgctgtggcgtgccggactccggctcattctgcatttccagataaagagccaccccaaccggctcgccccagttcaggtacaacttgactacggccagcggcatgaccagagccaccagcaacaaggcggcaggcacccagcgtgcgcgttgtcgagtcgtgtgctggtcctcaacgtcctccagcaacagccgcgacgcttcaccggcaatcgcctgcacctccgcctcatccagatgaccagccgtttgttgctcatgcaactcgagcatccgctcctcataaagcgccacgttgagcgcactacggtccacagtccgctgtctctgcactttccacagcggccacaccaccaccagcatgccgagcaataccagcaccccggtcaatacccaaaattgtgtcattcgccttacctctgccgaccgccagccattgctgaacggcatgtttgccagctgcatccaatgcactgccgacctgaacccgtctgattatatagatacccgcccctgacgcagttgatctgaatcctgctgtgacaagatgtcgccggccgcctcgggcagccggcacttttctgctagaatcttgcgcctttccctgccgacagcctgacgcatgagcctgcacccacctacactgcaccgccccggcccctctcgccgcttctgcgtggcgccgatgcttgactggactgaccgacactgccggttcttcctgcgccagatcagccggcatgccctgctctacagcgaaatgatcaccaccggcgcgctgctgcacggcgatgcccaacgttttctggcgcatagtgcggaggaacagccggtagcactgcaactcggcggcagcgacccgcaggcgctggcgcagtgtgccacactgtgcgaacaggccggctatgccgaggtcaacctgaacgtcggttgcccgagcgaccgggtgcagaacaacctgatcggcgcctgcctgatggcccatccgcagctggtcgccgattctgtgcgggcgatgcgcgagcattgctcaattccggttacggtaaagcaccgcatcggtatcaatggccgcgacagttatgccgggctgtgcgactttgtcggccaggtccacgaggcaggctgcgacagttttatcgtgcatgcacgcatcgcgatcctcgagggcctgtcacccaaggagaaccgcgaggtgccaccgctgcgctatgcagtggttgagcaactcaagcgcgacttcccgcagctggaaattatccttaacggcggcctgcagagcttcgagcagatcgacgcggcgctgggctgggcggacggcgtgatgctcggccgggaggcctaccagaacccctggctgctggccgaggtcgatgcacgcctgtatggcgatatgcatccagtcccctcacgcttcgaggttttgcaaaaaatgcgcccctacattgcccggcacattgaagggggtggccgcatgcatcaggtcacccggcatatgcttggactgttccagggcctgcccggcgcccgtcactaccgccgcgaactgagcaccgccgtgcaccattgtgatgatccgctggagctctacgaccaactgctggagcagatgcacagtcgactggggcaggattgccagtagcgccagcgctgcggtaaggtcaaggacaatcacctcttcgatggaatgtccatgaccagcaagctcgacagtctccggcaactcaccaccattgtcgccgacaccggcgacatcaacgccatccgcaccctgcaaccccaggacgccaccaccaatccgtcactgctgctgaaggccgctgaacaggcggaatacacgcacctgctggatcaggcaattgccgccagccgtggcagccatgacccgctaaccgatgcctgtgaccattttgccgtggcgctggggggtgaaatcattcgcctggtaccgggccgggtctccaccgaggtggatgcacggctgtcctttgaccgtgccgccaccctggacaaggcacgcaagctgatcgagggctacgagcgtgccggcatcacccgcgaccgcgtactgatcaagattgccgccacctgggaaggtatccaggccgccgccgagctggagcgggagcaaatccagtgcaacctgaccctgttgttctcctttgcccaggcgcgcgcctgcgccgatgccggcgtgcacctgatttcaccctttgtcggacgcatctacgactggtactgcaagcgcgacggccgcgactggcagggcctggatgacccgggcgtgcaatcggtggcgcgcatctaccgctactacaagctgcacctgtatgaaaccgtggtgatgggcgcgagctttcgcaacatcggccagatcgaggcactcgccggctgcgaccgcctgaccatcagcccggcgctgctgcagcaactggctgccgaagcgggacacgtgcagcgctccactggcctgcttggcgaggcggatgctcgcgaggtactggatgaacaggccttccgctggcagcacaacgatgacgccatggccaccgaaaagctggccgaggggattcgggcctttgccgttgatcagcagaaactcgagcagttgttggccgcccgcatgcgcgccagttcagcagcctgattcgagggcattgaccagatcacaaaacgcctcgcgattgctgtcattcaggcccatcagaatgcgatgggcctcgagcaccttgtcgcgcaccagctcttccgagagctgttgtggtggcagatcctgcaagggcgctgtcggctccagacaggtcggcagcatgttgaacacctgatcaaaccccatgctcaacagcaggcggttcatgtcctcgttgtctgacaccagggtcggcagaaaaccaaccttcttttgcgacagtaacgagagtttggccagcaaacccagtgaggtactgtcgatggcctgcgtttctgtcaggtctatcactatggcgcgaaaatccagcgcactgaaaatacgctcgatataggcatccagtgcggcgcacagggtcaggcgcacatcaccgatgaacttgagaacaaaggtaccttcggattcggcaaactgaatcctgccggtcgtcatcattgcaggttcctgctgacacacaaaacggataaatcatccggcagagcagcctcctccgccagcccaagcaacgccaacagggaatccaagtcaccagcagcctgctcgaccagctgtggcaaacgtgcttcccgctccttaagcgtagaccccggcaaacattccagcacgccgtccgaacagaacaccaatgaaaaatcctcaggcaaggaaatctgcctatcctcgtaagtcgcctgctcgaacaggccaaccggctgacctcgcccctgcaaatactcagccttgccaccactcaataacagcggcaagggcaggtgaccggcaatactgtaggtcagtgtcgactctgcctcatcgattacaccgccaaggatggttacatgcttgcccagccgacagttgatcagacttcgattgacatgcccaagcacctcggaaggcttgaactccaagggtccactgctaccgtcacggcgctgttcgtaaagcaggcgggtggtcatgaacttcagcaacacggtaacgaaagccgaagccaccccatgcccggacacatccgccagatagaaggctacctggctctcggacaccctgaaatagtcaacaaagtcgccggacaggtacaaggaaggaattacccgttgacgaaagcacagggtgcccgtctgccagggtgatggcggcagcatgttcaactgcacctggtgaccggcagcctggtcgtcgcgcaaggccttgaggtgattctgcaactcgccattgacctgctccaggcgctcacggatgcgctggttctcgcggtgcagagcataacggtcaaggcagcgacgcacggcatgactgagcaccaccatgtcatgcagaggcttgagcaggtaatcactggcgccggcacgcaatgcctcgacggcatccggcatgtgttcggagtctgtcagcaccagcaggggaatctgagcgtccgtctcgctgagttgacgaagtaaatccacccccggcatagcggtcggatgaaggtcgcagataaccagttccggacgacactcggcaaacagctgcaaagcacgctcggactgagcgcactgaagcacctggtatccttcactttccagcgcggtggcaaggggacaacgcacatcggcatcatcgacgatcaccagcaatgtggagcctgacagctgcatagattccatggatcagtgcccgaacaccgggacgggctatagaaatcgtgggtgcaggaatacctgacactttcaaggggcaaacactactcccatatgcagcgggtagcaaccttgccaaagccgacaggttgtgtgcccggacaacgggttataggatgtcagagcaaccatcagccgggcggagttaccatgagttttcacgaccagcaatacaatgaaaaacgcaatttcattcgcatgcagattgacacccaggcctatctgcaggtgtcggatggcggtgagcgtctggctgtggtctgtcaggacctctccagcaccggcgcccaactgcaatcagccaaaccactggaactgggtaccgaggtagaactgcaaataccttcgcccaccccccaacatcaggggctgaatgcccggggcaaggtagttcgctgccagtcacagggccccggggtacacattctgggactgacatttgacagtgtcagttagaagtcatcctcgaccaggccgtcgcgcaccttgaactcgcgattctgcaaccaggcattgcgcacaaaggtgtagcggtcacccatcaccagccgctcctgcttcagcaggtcggcccgggtatccaccaggtcgacggcaatcgaggtattacgggtgggcacatgatccaactggtcacggtagctgtaaccgattgccgcttccggcacccgtgaagccccgtcgcgcagggtgctcggccccagcagcggcagcaccagatacggtccactgccaacgccccaggcacccagcgtctggccaaaatcctcgtcattgcgctgcagccccattcgcgtggccacatcaaatacgcccaaaacgccaatggtgctgttgagcaggaatcgcgacaggtctaccccggcgtcgtgcggcttgccctgcaacagattgttgaacaggtttttcggctcgccaagattgccgaacacattactgacccctctgttcagagattccggagtcaccgcctgataagcacgggccgccggtttcagggtaaagcggtcaactgtgtcgttgaaactgaaaacaaccctgttgaagccctcccacggatcgggatcagcatggttcgcagcaaaatcatcggcatggaccgtcgacaacggcgcagcaacaagcagcgcagccatgacggcaggactgaatgacttgaacgacatgaatcatctccggtggtgacaggctgaatggctgtgcgaagtctagcgcaaagccatgcacgccggtagaacatgcctttacagagtctttaccagtcaccggcacaccccggcgacagctcgggttagacttcctgcaaccctggcaacggactctctaccatcatgcgaattttcactgcaggccgtgttggcctggctgcgctggtctcactagcgcttgccggcgggctttactggcagcaacgcggccctacagccccgacatacagcagtgccaccgtggagcttgccgacatagaagacagtatcacggccctcggcacgcttgagccactgaactatgtggatgtcggcacacaggtatcaggtcagctattgcgcctgcacgtggaacccggcgatcaggttgacgctggccaactgctcgccgaaatagacccgacgctctacctgacccgcgtcgaagccagcactgcacaactggccacccagcgtgcccagctgcaggatcgcgaagcccagttgcaactggccagactgcaggccgaacgccagcgccggttgctggccgaccaggccaccagccaggaggctgtggaagtagccgaagccaacctgcgctcggccgaagcgcaagtcgacgtgctcaaggcgcagatccgccagaccgagtcgacactcaaggcggaccaggcagacctcggctttacccgtatccatgcaccaatgaccggcactgtggtgcagcaactggcaaatcagggacagaccctcaacgccaaccagacggcacccttgattgtgcagattgccgacctgtcgagcatgactgtccgcgcacaggtttccgaagctgatatcgccaggctctcggccggcatgccggtctggttcactaccctgggccgcccggaggtacgctacgaaggacagctgcggcagatattgccaacccccgaagtgatcaacaatgtcgtgctgttcaacgccctgttcgatgtcgacaacccgcgcggcgagctgttgcccaaaatgagtgcgcaagtgttctttgtgcgcgcctcggccagccaggtcccaacgattccggttgccgcgctgcagacggttggccaaagcgccgcaaaccagcgcgtacaggtgatcgacgaacaaggcaacccggtcagtcgcgacgtacgcatcggtgttcgcaaccgcgtacaggccgaggtactggagggcttgcaggtgggtgagcgggtaatcaccggcggcatctcgtccgcacgcagtggcagcggtgtgtcgcgcagcacaggaccaaggttctaaggcatggataccccgcttatcagtctgcgtggcataggtcgcacctatcacaacggagacatagccaccacggttctgcaggatatcgatctggacatccaggccggcgagttcgtcgccatcatgggtgcctccggctcgggcaagtcgacactgatgaacattctcggctgtctggaccgccccagttgcggggattacctgtttgccggggagtccgtggagcgcctgcacaaggatcaattggccgaattgcgccggcgcaccttcggtttcattttccagagctacaacctgatcggctcggccagcgcccgggaaaatgttgaggtgcccgccatctatgccggtctgccccggcagcaacgccagcagcgagccgcgcaactgctgggcgacctggggcttggcgaacgcctcgacaatcgtcccagccagctatccggcggacagcagcaacgggtatcggtggcgcgggcactgatgaacgacggacaggtgatactcgccgacgagcccaccggcgcgctggacagccagagcggccgcgatgtactggaactgctgaaaacgctgcatgcacagggcaagacgatcattgttatcacccatgaccgcgatgtggcagcacatgccgaacgcctgatcgagttgcgtgacgggcgcatcatcgccgacacacgacgcagccctgagccggtagccgccccggccgagcctcaagcgccggcaccagaacgctccacccaaccgctgcaggacctgctggaggcggtacgcatggcctggcgggcgctgcgcagcaacctgttccggacagcactgaccctgcttggcatcgtgattggtgttgcctcggtggtggtaatgctggcactgggcaacggtgcacgtcaggaggtggtcgatcgcatcagctcaatgggatcgaacctgctactggtaaggcccggcgcacccaacacccgccgttcgatggacggctcgaccaataccctgagtctcagcgacgtcaacgtggcagccgacatcgccaacgtggtggttgccgtgccggaaatgaatggccgggtgacgttgcgcagtggcaacacggattatcagacacaggtcaccgccaccagccccgacctgccactggcacgcaattggccggtagcacagggcgtattcattgccgaacaagacaaccagagccatgcggcggtcaccgtgattggccgtaccgtggccaacaacctgtttggtgacagcgatccgctgggccattacctgctgatcaacaatgtgcccttccaggtgattggggtgatgtcggaaaagggcgcagcaccctggggtggtgatcaggacgatgtagtcttcgtcccgctgaataccggcagcctcagactgatcggccagcgtcacctgaactcgatcacggtcatgattgacaacctgtcgctggccgagcaaacccaggaagccgtgcgccaggcaatactgctcaaccatgccggggtcgaggacttccagatccgcaacatggcctcgttgctggaaaacgtcagtcagacgcaaaacaccttcaccatactgcttggctcgatcgctgcgatttccttgttggtagggggcatcggcgtaatgaacatcatgctggtgaatgtcaccgagcgcacccgggaaatcggcatccgcatggccacaggcgcacggaccggcaacatacttcagcagttcattgtcgaggcggtggtggtgtctgcacttggcggcgcccttggcgtgctcgccggactcggctttgcctggttgctgcaagcccttggcacacccatggtgttcacccttggcccggtattgctggcctttggctgcgccttcgctaccggccttgtgttcggtttcatgcctgcccgcaaggcagcccatcttgaccccgtggtagccctcaatgccgactagatacagcctgatcctggccgccctgctgctgggcggctgcagcctgaacagccctcttccagcccaccagccggtactgcctgggcagtggagcagccagacacagacaccggactggccggacagccattactggcaggcgttcggcgccgacaccctgctgcggctgcagcaacaggcacgacaacacaatcatgatctggccgccgccgctgcccgcctgcaacaggccgatgcccagctgcgccaggccggtgccgccctgctgcccagcctggatgccggcctgaacgccggccgcagcggcaacgacaacggcgtcggcaataatttgtctgccagcctgggggccagctacgaa

SEQ ID NO: 89 - DNA, 6827 bp, Unknown
  From metagenomic library of CO182
ttatccaaccacgctgcccagctggaagatcggcaggtacatagcgatgatcaagccaccaaccaggacacccagtaccgccatgatcaagggctccatcagcgtcgtgagattgtccaccatgttatcgacctcggcctcgtagaagctggctagtttgtccagcatctcgtccaatgccccggactcctctccgatggctgtcatctgaatagccatagaagggaaaatgccggtcgtacgcatagagaaattcagctgcacaccagaagatacgtcgttgcggattttcgcgactgcattgcgaaacaccacattgccagttgcccctgcgacggaatccagcgcgtccaccaacggaacacctgcagcaaatgtcgtagacaatgtacgcgcgtaacgtgcaactacagacttatagaggatgtcgcccacgatgggcgttttaagcaggatacgatcaagcgcatcgcgaaacttttccgaccgtttgtagctgtgcttgaaaacaaacgcacccacgagcagcgctgcagccaccaaataccaccattcctgcaaccagcgcgacagtccaaccaccatctgagtgaaagctggtaactcagcaccaaacccttggaacacgctttcaaattgaggcacgacctttatgagcaaaatcgccgaaacaatgatcgccacaacaatgaccgcgattgggtatgtcatagctttcttgatcttagccttaagcgcctcggttttttccttgtaggtcgccacccgatccagcagcgtctccagcgctccggactgctcgccggattcaaccaaattgcaatacagatcatcgaagtactgcggtttcttgcgcagcgaacccgcgaagctattaccggccgctacctcctgcttaatctcatcgaccagcttgcgcatattggggttatcgaaaccctccccaatgatgtcaaacgactgaagcaagggtactcccgccttcatcatcgtagccatttgccgggtgaacagagcgatgtccatgggcttgatcttcttgcccgcaccgaacagcgaaacagtcttcttacgtaccttgagcggattgataccttgcttgcgaagctgcgccttgatcagtgctgggctctggcctggcagctcccccttgaccttgccacctttccgatcggtgccttcccaggtaaacacactggttttcaacgctttttccgccatggttaatccttggtcacgcggttgacttcttccaggctggtaacgccattcatggctttaaccagacccgaagtgcgcaggtcattgaacccatctctgcgcgcctgcacggcgatgtcgatggaattgccttcctccatgataagccgctgcagtgcaggcgtgattttaaccacttcataaataccaacacggcctttgtaaccgctcttgcagctatcacaacctaccggcccataaagcttgaacgaaccgatccgcgcttctggaaaaccctctttgagcaggacatcacgcggcacatcaacttcttgcttgcagctggggcatagtttgcgtgccaagcgctgcgcaatgatcaggttcaccgaggtagcgatattgaacgccggcacccccatattgcgcagccgggtgagcgtttcagctgcgctattggtgtgcaatgtcgacatgaccatgtgaccagtctgcgccgccttgatggcgatctcggcagtctccaaatcacggatctcacccaccatgatgatatccggatcctgacgaaggaacgccctaagcgcctgagcaaagtccataccctgcctcggattgacattgacctggttgatgccctccagattgatttccacggggtcttctgcggtggaaatattcacgtccaccgtgttgagaatattcaggccggtatacagcgaaacggtcttacccgagccagtcgggccggtaaccagaatcatcccctgcggctgcttcagcgcggtcagatacaactctttctggtcttcctcgtagcccagagcatcaatgcccatcttggcgcttgacgagtccagaattcgcatcacaattttctcgccccatagggtaggtagcgtgttgacgcgaaaatcgatggatttggtactggataccttcatcttgatgcgcccgtcctgcggcttgcgccgctcggcgatatccagactggccattactttcaagcgcgcagaaatacggctgaccaactggaccggcggtcgagcaacctcgtgcaacataccgtcggtgcggaagcgcacacggtatgtcttttcgtacggttcaaagtgcaggtcggacgagccacctttgatcgcgtcgagtagcattttgttgacgaagcgtacaaccggcgcgtcgtctgcttcgttgtgctgggcgtcgtcctctttcttatccccactgatctcgacatccaacccgtccaggtcagcatcgccaagcccatcgagcgccgtagccgccgactcgaaaaacttctcgatggcctcgccaagcttgtcgtcttcaaccagcaccgcctcgaccgacaggccagtgttgaactggatgtcgcttatcgcttgatgattggtagggtcggaaaccgctacataaagcttgttgcctcgtttctgtaagggcaatgcacggtgctgacgcaccagcttttcactcaccagatcttttggttgcgtctccttatccagcgcccccaggtcgaagaacggcacgccgaactgctcggcggcgagatcgcccagtacccgccctttgaccagcttgttctgaaccagccaggtaaccaaaggcacttggtttcgcagtgcctgttgctgagcctgctgagcaatcttttcgtcgagctggcctgcaagtactaactgacgggccaagccgccaaggggcgcgttttcattcatcgggcgagcctgtggaggcgtgaaagaccgctgccttataactcagttccattggcgtgccaaacccgcacacaacaggtggcattttttgtcacttgaggacgcaaatggctattcgacctcatgtgatgccagcacccagaacgcctgtctaaacaaatagctgaaccgtagaccgctattcacgacggcacacagaccaagcagcatcgcacttgaaccacattaggagtgccagacggagtctataaaagtagagccagctcacagcccggtcaggtcacactgcccgccatacgcgcttggcacaaaagctgctcaagccataccaggtcccatgacctcaccaacaaggagcttttcaatgaagtccatcaagaagcaaaaaggttttaccctgatcgaactgatgatcgtggttgccattattggaattttggctgccatcgctattccgcagtttaacgagtaccgcgcgaaggccaacgattcaactgccaacgccgacgcaaagaacgccattaccgtaatgactgccgctcagcgataagcaataactgaaatcataggagctcaacatgaaaaaactaattttttcccttattgccggcatcagtatttcaactaacgtgctggcagccgacgctggtgcggccatcacaagcggcacagctatagatacaaccgcagccgcaggctgctcgctgttgtcagaggatgtaaccataaatctctcaaactctgtctttggcgcatatgcctgtaacgtcgtggacaatgtcattggtgtagctacttgccatccaacaggacgaaagggcaatgtcagtgttgcctgcgacccaacggcagcacaaggagctaacggcttcgtagcaggttgtgttgctactaccggcgccgctgcgaacgttggtacagctacagtacaaggaggcctcgctttcactgccagctcccagggtggacgggtaactggtgctgaagcagccaattgcgttactggtggcaatacgatcgcggaagctcaaagcgcggcagggctgtaagcgaaatataaagaagggggcatgcccccttctttggactgccgggactgcgcaatgtgaaaaagcaccaagcttttacattgatcgaaacaatgattgttgctgctattattagtattttggtagcgattgctctaccgatattttctgagcgcaccaaaaaatcgcatgatatcagcgcattatcagacgctaaaacctcaattaatataatcatagcagcaaaaaaataagatcaccctcatcgataaatcaatgagatgaatgacccacactattttatttaactaactccgcagcgtcgcctatgcagttttcttctcattttatctcggccactcgtttagctattcgctctaattttgcctggccagctagcgtagcattgatttttttgctagtcgcagcgctcattgcctcaatgttcagcggtcgacagccggctaccgtcacgttagatgttggcctttcggtaattcggatgatattgccttttatttctgcactgatggtccaggagcttctttcgcgagagttcgaccgacgctactgccttaatacgttttcttacccgcacacaagaaatagctttttacttgggcgttttctggccgtggcgcttctaacgattggatttttattggtcctatcaagctctctagcgttattagtctggatcgtgaagcatggctacccgcaaggaacctctgtggcactgggcgccccttttgttatcactatcgggtttatcggtctggacctactgctactagtagcagctgcattccttttcgccattatcacttctacgccatactttgttctgattggtactcttggcgttatgattattggacgttcgttcgccgcggttattgacctcctgacttataactcgacggtcgtaagtcaccccgaaggctaccgcgcgagtgtcagcttgctcggatatattctacccgacttgggtgcgcttgatgtgcgcatggtcgcgctttatggtcgaatggaattcatgccgcccgattggcctttgctggtagtgtctaccttggcatatacctgtgggttattaggtctcgccacctgggccctacaacgcaagctttttgcttaaatgggtaaaatcaaaagtctgccactagcgctcgccgtattcggctttgtgctcttcgccagcatctacgccacgcgcgctcagatactcgtatcaccgacaccaaaattttccacagaccgcatttcactttccgctccgctgttgatggtattgcatggaggcgatcaatttcttgcggccaatttggagactatgcgccttgccgccaccggcatgaatgattacggcgtggataccgactacctgattcgcgcccagcgtgaagtagcccgcctcaacccctgccatgaagacaattattatctcgccaacggcctgctgacctggggcggtgcggtggagcagggcaatgaggtactgcgcgcggccgttgattgccgcttctgggacgaatttccacccttcttctatggcatcaacctgtcgtttttccagcgcgacaacgaggaagccgcgcgggtgctcgagattggcgcacagcgatcgacagtgaacgccgccgcgatgcagaaactggcggtgatgctgcgcgccgaacgatttgccgacgaaagactggctttgaattacctggcccaacaacgcgacagcgccagcgatccgaaattgcgcgacatgttggacaagcgcgtcatccgcttgcagggcttgatctatttacgcgaggcccagcgtcgctatgagatcgatcaaggcccgctagctgacatgcaggacctgatcgaacaggacatcatcgccgagctacccaccgacccactacgcctcggctatgagctacgcaatgggcgcatcgaattgaagaaattgaagattgccggattggaggaacagccttgagcgctgccattgagtttcagggcgtcagccacaccttcaaggctaaaggcaaagaggtccaggctgtacgcgatgtgagtttcagcctgagcgagggcgaggtgttcggcttcgtcggccccaatggcgcaggcaagtccaccacgattaagatcatgctggacatcatcaacgactatcagggtcaggtgaccatttacggcacggacgcgcatcgcgccgaagcgcgccaaggcctggcttacgtgcccgaagcgcctgcgctgtacgaacaattcacgcccctggaaatcctacgcatgggcttgtccatgtatggcatcaagcgcagcgacgccgatgcttggtgcatgcagtggctggagcgtttctctattgccgagtacgccaagcggcgtattcgccagctctccaaaggcaacgtgcagcggaccgccctcgcccatgccatggcggtagagccgcaactgttgatccttgacgaacctctctcaggcctcgacccggtgggtcgcaaggatgtggtggacattctcaacgagtataagaagcaaggcggggccattttcttcacatcgcacgttctgcacgacgtcgagcgcatcgcggaccgtttcggctttatcaacaagggccagctgctgacagttcgctcccctcgagagctggcagcagaacgcgccagccatttcattatccgatatcaggccgaccagccactctcgccatcctgctcggcgctgcgtcctggagagtttgaatgtgagatggaccaatccaaactgccagaagccatcgcccagttgagcatcacgggcggacacctgcttgccgtgcagccggccgtctcgctggaaaccgtattcttccggattcttgaagaagcaaact

SEQ ID NO: 90 - DNA, 39465 bp, Unknown
  From metagenomic library of CO182
cggctcgctgggcgagcgcaattcgctgtcgtgcggttccatcgagcacaagatgggcatccaggcgtcggctacctgcgtgatgaacttcgatggcgccgtcggctggatggtcggcgagccgaacaagggcctggcggcgatgttcaccatgatgaactacgagcgcctgggcgttggcatccagggtctggcaaccggcgagcgttcctatcagagcgcaatcgagtacgcccgcgatcgcatccagagtcgcgcaccgaccggacctgtggctcaggacaaggcggccgatccgatcatcgtgcatcccgacgtgcgccgtatgctgctgaccatgaaggctctgaacgagggtggccgagcattctccagctacgtcgcgctacagctcgacattgccaagttcagcgatgatgacgaggcccgtcagcgcgccgaggcgcaggtcgcactgctgacccccgttgccaaggccttcctcacggatatggggttggaaaccaccgtacatggtcagcaggtatttggcggccacggcttcatccgcgaatgggggcaggagcagctggtgcgcgattgccgtattacccagatctacgaaggtactaatggcatccaggcgctggacctggtcggccgtaagatcgtcggcagcggcggcaccatgtatcaggcttttgtcgacgagatccgcgccttcatcgccgatgctggtccggagctgacagagttcgccgagccgctcaaggccgccatggacaacctggacgagctgacagcttgggtcatcgataaggccaaggctaatccgaacgagatcggtgccgcctcggtggaatacctgcatgtattcggttacaccgcctacgcctacatgtgggcgcgcatggctgcggtcgcgtttgccaagcgggaggagggcgacttctaccagagcaagcttggtaccgcgcgcttctatttcgcccggctgcttccacggatccattcgctgagcgcttcggttaaggctggtagcgagtcgctgtacctgctcgacgcggctcaattctgatcgctgcggcttaatctaaaggcaatatgaaattatttggccatgatacggaacgattaagccgccgctccggtcataaaaatcgcgcaatgtaagcttcgacttacagctctgcatcatggatgacgcgatgtaggaaaaggcttacaaggcgtgatgcacaatggctactacaggtccgcgagggcaggcagtaatctactgcatagggacgtggcgcatggaaagcgcgaatcaacaatacggatcacacagggagcggtgccaggacggcgcgcgatcatggatgtcaggattcagtctgcagagccccgcttcggcggggtttttcttttctgcttagtcatcagcgtcaattctgcgcggccaggctgacattgacggtgcggacttaaccctttcgcgttcttcgtatcagtccggcatgcagacgccagtgccacccagcccgcaatagccgcccggattttttgccagatactgctggtggtaagcctccgcatagtagaacggcggtgcgtcggctatctcggtggtgattgccggaaagccagcattgctcagacgctgctgaaagcgctcccgactggtctccgcctcgctgcgctgttgcgcatccgtgcaatagatcgccgagcggtactggctgccgatatcgttgccttggcgcatcccctgggtggggttgtgcgcctcccagaacgttcgcagcaaagtggagtaatcgatctgctgagggtcgaataccaccagcaccacctccgtatggcctgtcaggccggaacagacttcgtcgtaggtcgggttcggtgtcaagccgccggagtagcccacggctgtcgtccacacccctggtaactcccagaagcggcgctctgctccccaaaagcaccccatggcgaatatggcttgggataagccggccggaaagggcggctgcaaagggttgccgtttacataatgggctggtggtactggtacggctgtcgagcggccgggcaacgcctgctcggcattaggcagtgcctgtttgttgaccagtatctgcgagcgtagcgacatggttgcctcggtcgaaatgggggcggacggctaggctacaaaagcggacatgatagtgaaagcttgacggtgaccacgcgtcgccgatctggcgaaagtgtttcccggcgcttagcgccaatggggatagcggcgcaaggcgtcgctcaggatgttgccgggaatcggtttgtcgaagagatatccctggccgatatcgcagcgatgatggcggaggaacttgagttgctcggctgtctcgataccttcggcgaccaccttcaggtgcagcttgcgcgccatggcaatgaccgcggaggtgatctccatgtcgtcctgattgtcgggaatatccttgatgaagctgcgatcgatcttgatcacgtcaatgggaaatttcttcaggtaactgagcgacgaatatcccgtgccgaagtcatccatggccagggtcaggcccaatgccttcaaaccgatcagctgctgtcgggtttcttcggttgcgtcgagcagcaggctttcggtcagctctagttccagctgacccggaggaagctgctcctccagaaggatggaggcaatcgagcccagcagatccgggtcagagaattgcttgggagacaggttgatcgcaatctgcggtttgccgtggcccagcgccgacagtctgacgcccatgcgacatgcctcgcgcaggacccacttgccgataggaatgatcaggccggtctcttcagcgacactgatgaactgatccgggcggatcattcctttttccggatggttccagcgcagcaacgcttccagtccctgtagctgtccgctacgcaggcacagcttcggctgatagaagacttcaagctcgttctgagtgagggcgcggcgcaggttgttctcgacgaacagtttgtagttggcctcggcatgcagtgcctcggtgaagatctgcacctgattcttgccgttggccttggccttgtgcagcgcttgtcccgcatgcttcatcagcgtttccggatcccgaccgtgttgcggcgagcaggccagtcccagcgacgcgctgacgctgatcagctgcttgtcgacgaacagtggtttgtcgaggacgcgcagaacctgatcggccagccgcagcccttcatccagctccatgtcatcgaacagcaaagcgaactcgttgctggcaaaacgtgccagcacgctctgctgactgaggccgttgcgcagtcggcgcgccaggctggtaagcagcttgtcgccggtctggtgaccgaggctgtcgttgatgcgcttgaagttgtcgatatccaccaacagcaggcagagccgaggctcggcacctgcagcaaagcgttcctcgaggctgcgaatgaaatatggccggttgccgaggttggtcaggttatcggtataggccagtcgctcaatatgctgatgggccagtttgctgcgggtgatgtcttcgtagatgccgatgtaatgagtcagcacgccttcatcgttgaacaccttggagatcgacagctgaccccagtagggctccagattcttgcggcgggagcggaactcgccctgccagctgttgctgtgggcgagtaccgatgaggtatcgaacagcagctcgctgagattttccagggccttcaggtcggtcaggcggtggccgcgtacctcggccgcggaggactggctgatgctggtgaaggccggattgacgtactccacgcggccgtcacggtcgaccaggatgaaggcacttgcgctctgttccacggcgcgctggaacagactgagcatatgggtcgcgctcagccgttgctggttggccagcacttgtgcgtactggtccgccagctctccggcgaaggcgacctcgtcggcttgccaggttctcggctgaccggcgtgctgcaggctcaacacgccgatcacttcaccaccgactcgaatgctggcgtcgaggatcgagcggatgccttgcgggcgatggagctgctcgcctaatgcgctggtgcgatggtcctgcgacacgtcctgcgcatcgacggcccgcccgctctgcagggcttgcagatagcgcgggaagggcgtcagttccacttccggcagcgtttcatagttgtcgctgccgagcctgtagcaagcaatcggctcgaggcgggtgccgttcagatgccagatggctgcacggtcgacctcatagacttcgcaggcggcctgcgtgatcagttgcgctgcttcctgctgtggattggtggaactgtatcggtgccgcgccagcttgacgatgagtccctgctgcgtacgtgagcgcagcatgtgttcgaggtgttcgtcctgcgtctgctggtgctgctgcagcgaggtgcgaagacgggcattctgggacctgaggtcctgatccgactctggccttcggcccgccatcagatagccccgcagcaattcacgcccgtactgctggcagacttcgcccagctcagtgatatccagcacactgtcaggtgtgtgtagccggtaactgacggaatagtggttgcgtgcgctcagctgctgctggatatcttcatgcagctgaagacgagcgctgggctccatcaggctggcataaggggagtcgatcagtgagcacaggtcgctggcagacacgccgagcagacgttcacaggcagggtcgagaaacagcagcgtccagctggactcgttcagccgctcgaaacgcagcatgcccagccgtgaaggcactggcaactgcgtcacaacctcggtcgccagacggctggcggcatcggtatgtattttcatcgagcggttggcttccagtatgctccacggagtcgggctggctcgggctccaggcaccgttccggcgaaggacgatggctaaataatattaattccggcaagggtgcatcatgcgacagggactgacaagtcgacttgcgaagttagtgatggtctcggttttgtgggtgatcggcacaccagcgatggcggctgagccgatcgaattcggttctgacgaatcgaccctctacctgaccgaactgaagaagctttatctcacctcgagcgatcgcacggcgctgctgacgcacagcaatagcctcttggatacctacgcattgcgtgccggttaccaggtcggccaggccaatccccaggactttctctacgagctgagcgtcaccgcgccgggcgagttgcgtatccgtgaggaagtgcgtggcagcagtggcggcgtagccgttcgcaatcgcagtctgtcggtatttggtctcgatccctacctgcaataccagtgtcctcctcaggggcctagctgcttcgtcaacagtccggtcgacggcctgccgttggtggtcatcctgcgcgaccccaagggcgctgaagagctcgccaaggcactgtcgtttctgattcgcaacctgcaaaagggctgacagaacggccagcgactgcacctgagctgatggctttccggcaacctggaaaacaagaacgccgcgccctcgtgagaggacgcggcgttcctgtttgggtacaggcgtttacagcagcatcgtacgaatatccgccagcagctcggataggcgcttggtgaagcgcgccgccgccgcaccgttgatgacacggtggtcataggatagcgacagcggcagcatcagccgtggctggaaggccttgccatcccacaccggctgcatggtcgccttggatacgccgaggatcgccacttccggtgcattgacgatcggcgtgaagccggtgccgccgatgtggccgaggctggagatcgtgaagcacgcaccctgcatcgcatccggtgaaagcttcttggtacgggccttctcagccagctccgcagcctcgccggccagttgcagcaggctcttctggtcgacgttgcgaatcaccgggaccatcaggccgtccggcgtgtcgacggcaaaacctacgtgcacgtacttcttgcggatcagcgccttgccgctcggggccagcgaactgttgaagtccggcagttccttgagcaggtgcgcgcacgccttgagcagcagcggcagcacggtgagcttgaccccagccttttcggcgattgccttctgcgcgacgcggaaggcttccagctcggtaatgtcggccgactcgaactgggtcacgtgcggcacgttgagccagctgcgatgcagattggcggcaccgacctgcatcaggcgagtcattgctacttcttcgacttcaccgaaacggctgaagtcgatcgccgggatcggcgggatgcccgcaccaccggtagcaccctcggcaggagcctgcttgaccttgtgcagcatgttcttgacgtaggcctgaacgtcttccttgaggattcggcccttcggaccagtggccggaacatcagccagctctacgccaaactcgcgggcaagcatgcgtaccgctggccccgcatgcaccttggtgcctgccttgctcggaccgctgaccgccggagcgggcgttgcggcagctttcgcctcgggaacgccttgcttgttcggtgcagccgcctgctgttgcggtgcagcctcttccgccttggcggcgggcttcttcgctggcgcggtgccttgaacccttagggtcaggatcagatcgccggtcctggcttcgtcgccgaccttgatcgacagcgattccacaataccggccttgggtgccgggatctccatgctggccttgtccgattccagcgtgatcagcgactggtccgcctcgacgctgtccccggccttgaccatcacttcgatgacattggcactgccgctggagccgatgtccgggatgcgtacttcttccacggattcgccggcggcttcggcaggctcttcagctgccggctcgctgagcttttgcttcggtgcgcttgctgcctggcttgctggcgccttgcttgctgccggcttgctgggcgctgcgcctttgagaaccaggatcagatcgcccgtgccgacttcatcgcctaccttgaccgaaatgctctcgaccacgccggctgcgggagacggaatctccatgctggccttgtccgactcgagcgtgatcaacgcttgctcggcggcaatggtatcgccgggtttaaccgcgatttcgatcacgctggctttgcccgaggaaccgatatccggaaccttgatctcctgtgtctcgccttcgccggccgaggccgaagcatcgtcgtcgcccggaggcgtcggcgcttcggtttcatcggtcgggccgccgctcgccgcgccagcaggttcggctgcagcctgtgccggagccgcgctgtcctggccttcttcgctttccagttccagcagctcgtcgccttctttcaggcgatcgccgagcttgaccttcaggctcttcaccacgcccgccttgggcgcgggaatttccatgctggccttgtcggattcgagcgtcaggatgctctggtcggcttcgatacggtcgccgaccttgacgaacaattcgattacttcaccctcaccgctgccgatgtcgggtacgcgtatggtttcactcacaataggttctcctgtgcgcacgcatcagcaatccagcggattgcgcttctcggggtcgataccgaactcggtgatggcgttggccaccacggtgcgttcgatggcgccgcgatcggcgagtgcttgcagtgcggccacagtcacccagcgacggtcgacctcgaagaaatcacgcagcttggcgcgcgagtcgctgcggccgaaaccgtctgtacccagcacctgatattcgcgcgacggcacccactggcggatctggtcggcgaacagcttcatgtagtcggtcgaggcgatgaccggaccttcgcggccttctaggcactgctggacgtagctcttgcgcggctcctcggtcgggtgcaaacggttccagcggtctatcgccaggccatcacggcgcagttcgttgaagctggtgacgctccagacgtcggcgcccacgcccatcttggcgaggatgtccaccgcggcgcggacttcgcgcaggatggtgcccgaacccagcagctgcacgcggtgcttgaagtcgcccttggcttcttcgagcaggtacatgcctttgatgatgccgtcctcgacaccctgcggcatggctggctgctggtagttctcgttcatcacggtgatgtagtagtagacgctcttctgctgctccatcatctcgtgcatgccgtggtgcatgatcaccgccagctcgtagccgtaggtggggtcatagctgcggcagttggggatggtgctggcgaggatgtggctgtggccgtcctcgtgctgcaggccttcaccgttgagcgtggtgcgcccggaagtgccgcccagcaggaagccgcgggtctgggcatcgccggccgcccaggccaggtcaccgatccgctggaagccgaacatcgagtagaagatgtagaccggcagcatcggctggttgtagttgctgtaggcggtacctgcggcaatgaacgaggagaacgcaccggcttcgttgagaccttcctgcaggatctggccgtctttctcttcgcggtagtacatcacctgatcgcggtcgaccggctcgtacagctgcccgaccggggagtagatacccagctggcggaacatgccttccatgccgaaagtccgcgcctcgtcggcgaggatcggcacgatacgcttgccgagatccttgtccttgaccagctgcgagaggatgcggccgaaggccatggtggtggaaatctcgcggtcgccggagccgtcgagcactgccttgagggtatccagcggcggtgtcgggatgctgaagctcttcggccggcgctgcggcaggtgaccgcccagcttgtcgcggcacttgcgcaggtacttcatttccgcgctgtcttcggccggacgatagaacggcagctcctcgagctgcgagtcgttgaccgggatgtcgaagcgatcgcggaatttcttcaggctgtcgatatcgactttcttggtgttgtgggcgatgttcttcgcctcaccagcaccggtgccgtagcccttgatcgtatgcgccaggataacggtcggctggcccttgtggtgcacggcctggtggtaggccgcatagaccttgtagggatcgtggccgccgcggttgagcttccagacttcttcgtcggacatgctctcgacgcgcttgagcagctcgggatcggcgccgaagaagtgcttgcgcacgtaggcaccgtctttggccttgtagttctggtattcaccgtcgatcgcctggtccatgcggcgctgcatgcgaccatcctcatcgactgcgaacagcggatcccacaggcggccccagacgaccttgttgacgttccagttggcgcctttgaacacgccttccagttcctgaatgatcttgccgttgccacgaaccgggccgtccagacgctgcaggttgcagttgatgacgaataccaggttgtcgagattctcacggccagccagggagatcgcgccgagggtttccggctcgtcgcactcgccgtcgccaatgaagcaccagacgcgctgcttgcctttcggaatgaagccgcggttttccaggtacttcatgaagcgcgcctggtagatcgcggtgatcgggccgaggcccatggagacggtcgggaactgccagaagtccggcatcaggtgcgggtgcgggtagctcgacagacccttgccgtcgacttcctgacggaagttgagcatctgctcttcagtcaggcggccttccaggaaggcgcgggcgtaaatgccgggggaggcgtggccctggtagtagatcaggtcgccgccatgctcttcggtcggtgcctggaaaaagtagttgaagccgatgtcgtagagcgtggcgctggaggcgaaggtggaaatatggccgcccaggtccggatccttcagattcgcacgcatcaccatggccagggcattccagcggaccagagagcggattcgacgctccatgaacaggtcgccgggcatcttggcttcacgggtgacggggatggtgttgcggtacggcgtggtgatgccgtagggcagcggagtgccgctacgtgtggccagttcgcccatccgggtcatcaggtagtgagcgcggtcttcaccctcgcggtcgaggacggactcgagggcgtccagccattcctgggtttcgacgggatcgagatcttgcatggcttgctccatggcggaaaggcttccagaatcggtcgcctgttcgctaccggctttgtgggccggtgcgtgtaatgttcttggacgaatgccgggggtaggaccgggcgtctgtagttttactacaaaaacgcgccgggatcagccccctgaaatactctttagtagtaaaactacagatcagcggcgctggcattttcctgaaaaaggcatatgcgaggctctgaatcgcggtttaccgtactgctgtcgtaaaggaaaccacaatgagtctgcccccgctggttgcattgccgtcctcgctcctgccttttgtcagtcgagccgaagagtcgttcctcgccgctgccggcagcctgtcggaagcacttgcggcacgttgtcacgtctggttggctgagcagcgtgaggcgttcagtcgggtctgtgcagcgagcgatttcgtcagcgaacaggttagtcgagatccgcagatgctgctgcagctggccgagctgggctggctggagcggtcgctcgaggctggcgaaatgcgcgaagcactcggcgagctggtcggtgcctgcgacaacgaagacgccttggcgctgaccttgcgccgctttcgcaatcgccagcaggtgcgcatcatctggcgcgacctgactcgtcgggccgatctcgctgaaacctgccgtgacctttccgatctcgccgatgcctccgtcgatctggcttatcactggctgtacgtgcgtcattgcgagcagttcggcgtaccgaccgggcgtcgcagcggcaccgcgcagcacatggtcattcttggcatgggcaaactgggcgcccatgagcttaatctctcttccgacatcgacctgatcttcggctatccggaaggcggcgagacagtcggcgccaagcgctcgctggacaatcaggagttcttcgtccgcctcggtcagcggctgatcaaggcgctggacgcgatcactgccgatggctttgccttccgcgtcgatatgcgcctgcgcccgtacggctcgtccgggccgctggtgtacagcttcaatgcactggagcagtactaccaggaccaggggcgcgactgggagcgctacgcgatgatcaaggcgcgggtgatcggcggcgaccagcaggccggcaaggagctgctggagatgctgcggcccttcgtctatcggcgctatctggacttctcggcgatcgaagcgctgcgcaccatgaagcagctgatccagcaggaagtgcggcgcaagggcatggccgccaatatcaagctcggtgctggtggtatccgcgaagtcgagttcatcgctcaagcctttcagctgatccatggcgggcgcgatctcagcctgcagcagcgtccgctgcttggcgtgctggccaccctggaagggcagggctacctgccagccgcggcggtcgtcgaactgcgtgaaggctacgaattcctgcgctacaccgagcacgcactgcaggccatcgccgatcggcagacgcagatgctgccggaaagcgaagtcgactgcgcgcgggtcgccttcatgctcggcttcgacagctggccggcctttcacgagcgactcctgcactggcgtgggcgcatcgactggcatttccaccaggtgatcgccgacccagacgaggacgaagccgccgaaggcgatgcattggtcggcggtgagtggttgccgctgtgggagcaggactgggacgaggaattcgcctgccgacagctgtccgaagccggctttcgcgacggccagggcgcctgccagcgccttgccgcactgcgcaatgccagtcaggtgcgcaccatgcagcgtctcggtcgtgaacgactggatgccttcattccccgcctgctggcgcagactgtcgagcaggccgaccccgatctcgtgctcgaacgtgtgctgccgctggtggaggcggtcgcccggcgttcggcctatctcgtattgctgaccgaaaaccccggtgcgctgcagcgattgctcgagctctgtgcggcgagcccgtggatcgccgagcagatcgcccgcttcccgctgttgctcgacgagctgctcaacgccggtcgtctgtacagcccgccgctggcgccggaactggcggctgaactgcgcgaacggctgatgcgcatccctgaggacgacctcgagcagcagatggaggcgttgcggcatttcaagctggcgcaccggctgcgcgttgccgcctcggagatcgccggtacgctgccgttgatgaaggtcagcgactacctgacctggctggccgaggcgattctgcaggaagtgctgaccctggcctggcgccacactgtcgcgcgtcatggccagccgcagcgcagcgacggcacgctctgcgatccggcattcgtcatcgtcggttacggcaaagtcggcgggatcgagctcggtcacggctccgatctggatctggtgttcatccacgacggcgaccctgctgcggagaccaatggcgccaagcccatcgacaccgcgcagttctttacccgtctggggcagcgcatcatccatctgctgaccacccagaccacctctggccagctctatgaagtggacatgcgcctgcgcccgtccggcgcttccgggctgctggtcagctcgctgggcgccttcgagcgctatcagagtcaggaggcctggacttgggaacatcaggcgctggtgcgtgcgcgtgtacttgtcggctgcccgcagctgaccaccgatttcgagcgggtgcgtgccgctgtgctcggtcgcgaacgcgatctggatgcgctgcgccgcgaggtcagcgacatgcgcgcgaagatgcgcgacaacctcggtacccgggcgacgcatgcggggaccgctgagcaagccttcgacggcgcggccgagttcaatctcaagcaggacgccggtggtatcgtggatatcgaatttatggtgcaatacgcggctttggcgtggtcgcaccagcatcccgaactgctgcgctataccgataacatccgcattctcgatgggttggagcaggccgggttgatgaccggcgatgaggtccggctgctgcaggacgcctacaaggcctaccgcgcggcagcccaccggcaatcactgcagaagcagcccggactggtgagtggggatcaattccacgacgagcgtcgcgcagtcatgcgtatctggcgcgagttggggctcagctgagtccctcgtcgggctaccaagcaatatcgaattctgaggagctggcaacgatgtcgatggccgatcgtgatggcgtcatctggtatgacggcgaactggtgcagtggcgcgatgcgaccacccatgtactgacccataccctgcactacggcatgggcgtgttcgaaggcgtgcgcgcttacaacactccggacggcacggcgatcttccgcctgcaggcgcacaccgaccgcctgttcgattcggcacacatcatgaacatgccgatgccgtactcgaaggaagagatcaacgaggcgacccgcgccgcggtacgcgagaacaacctggaaagcgcctacatccgcccgatggtgttctacggaagcgaaggcatgggcctgcgcgccagcggcctgaaggtgcatgtgatcgtcgccgcctggcactggggcgcctacatgggcgacgaagcgctggaactgggcatcaaggtccgcaccagttccttcacccgccatcacgtcaacatcaccatgacccgcgccaagtccaacggtgcctacatcaactcgatgctggccctgcaggaagccatttccggcggcgccgacgaagcgctgatgctggaccccgaaggctacgtggccgagggctcgggcgaaaacatcttcatcatcaaggatggcgtgatctacaccccggaagtcaccgcctgcctgaacggcatcacccgcggcaccgtgctgaccctggccgccgagcatggcctgaagatagtcgagaagcgcatcacccgcgacgaggtgtacatcgccgacgaagccttcttcaccggtaccgccgccgaagtcaccccgatccgcgaagtggacggtcgcgccatcggtatcggccgtcgtggcccgatcaccgagaagctgcagaaagcctacttcgatctggtcaccggcaagaccgatgcccacgccgaatggcggaccctggtcaagtaagcctggcgctgggagccggcagcgcatgactcgcttgccggccacgcttccagcccctcagcttatggcttagagcttatgaacatactgatcgtaggacccagctgggttggcgacatggtgatggcgcagacgctgttcgtctgcctgaaacagcgccatcccgactgccagatcgacgtgctggcgcctgagtggagccggccgattctcgaacgcatgcctgaggtgcgccaggcgttgagctttccggtcgggcacggcgtgctcgacatggcgacccggcgcaaggtcgcgcagagcctgcgtggtcagtaccagcaggcgatcctgctgcccaactcgctgaaatcggcactggtgccgttctttgccggcatccccaagcgcaccggctggcgtggcgaaatgcgtttcggcctgctcaacgacatgcgcaagctggacaagcagcgctatccgctgatgatcgagcggttcatggcgctggccttcgagccgggcgccgagctgcccaggctctatccgaacccgtcactgcgcatcgacgccgaaacgcgcgatgcggccctggcacgcttcggcctgagcctggaccggccggtgctggcgctgtgccccggtgccgaattcggtgagtcgaagcgctggccggctgagcacttcgccaaggtcgccgaggtgaaggtccgcgaaggctggcaggtctggctgttcggctcgaaaaacgatcatccggtgggtgagcagatccttgagcggctgattccgggcctgcgtgaagaggctgtgaacctggccggcgaaaccagtctggccgaagcgatcgatctgctctcctgcgccgatgccgtggtgtccaacgactccgggctgatgcatgtctccgctgcgctgggccggccattggcggccgtctacggttccacctcgccagcctttaccccgccgctttccgaacaggtcgaagtggtgcgcctgggcctcgactgcagcccctgtttcgagcgcacctgccgtttcggccacaacaactgcatgcgcgagctaaagccgcgcgcggtgatcgaggcgctggatcgtctggtcccgcagtcggtcgaggtgcgctgattgaaggtcctgctggtcaagacctcgtcgctgggcgatgtcgtgcataccctgccggccctgaccgatgcgcagcgggcgctgcccggcatccagttcgactgggtggtggaggagggcttcgccgaaattccggcctggcatccggcagtggcacaggtgatctcggtagcgattcgccgctggcgcaagcacccgctgcagaccctgcgcaacggtgaatggcagcgcttcaaggcgcgcctccgggaaggccgttacgacctggtgatcgacgcccagggcctgctcaaaagcgcctggctgacccgctacgtgaaggctccggtcgccgggctggatcgcgattcggcccgcgagcccatcgccgcacgcttctatgaccgctgctatgccgtgccgcgtgaccagcatgcgctggagcgggtgcgccagctgttcgcccaggcgctcggttatccgctgccgcaggacgttgccgactacggtctgaatcgcgagcagatggcggcgcccagcgatcagccgtatctgttgtttctgcacggcaccacctggccgagcaagcactggccggaagcctattggcgcgagctggccgaacgcatgagcgatttcggctgggcgatccgcttgccctggggcaatgccgaagagaaggcgcgggccgaacgcatcgtcagcggcatagccaacgccgcggtgctgccgaagctcaatcttgccggtgtcgcccgggtcatcgccggtgcacgcgcctgcgtcgcggtggacaccggtctcggccacctggctgcggcgctggatgtgccgagcatttcactttatggtccgaccctgcccgggcgggtcggcgcgtatgggcgctcgcaggtgcacctgtgtgccagcgggccgaacgccggtcgcggtgaccggcacaagccctgtttcgacgacctgcgccccgagcgcgtcgtcaccgaattgaaagccctgctgcgggccccggagtccgtctgatgcaactggccttcattctctacaagtattttcccttcggcggtctgcagcgcgatttcatgcgcatagccctcgaatgccagcgtcgcggccacacgatccgtgtctacgcgatgatctgggaaggcgacgtgccggacggcttcgaggtgctgattgcaccggtcaaggcgctgttcaatcacacccgcaacgagcgcttcactgcctgggtcgaggcggacctgagcaagcggccggtcgaccgggtgatcggcttcaataagatgccgggactcgatgtgtattacgccgccgatccctgcttcgaggacaaggcgcagaccctgcgcaacccgatttaccgccgctggggtcgctacaagcattttgccgagtacgagcgcgcggtgttcgcacccgaggcgaagaccgaaatcctgatgatctccgaggtgcagcaaccgctgttcgtcaaacactacggcacgcccgccgaacgctttcacttgttgccgccgggcatcgcccaggatcgccgcgctccggccaatgccgcgcagatccgtgccgagttccgcgaggagttcgaggtgcgccccgacgagctgctgctggtgcagatcggttccggcttcaagaccaagggcgtcgaccgcagcctcaaggccttggctgcactgccgcgcgaactgagccagcgtacccggctgctggtgatcggccaggacgatcccaagccgttcaagctgcaggccaaggcgctgggcgtttccggcatggtcgagtttctcagggggcgtagcgacatcccgcgctttctgctcggtgccgatttgctgatccatccggcctataacgaaaataccggcaccgtgctgctcgaggcgttggtcgccgggctgccggtgctggtcagcgacgtatgtggctacgcccactacatcgccgatgccgattgcggtcgcgtggtgcccggcccgttcgagcagagcgtccttgatcgaatgctggcacagatgctggccgaggatcagcagcgcgcggcctggagtcgcaacgggctggcatatgccgaaacggccgacctttattcgatgccgcagaaagcggccgatgtgatcctggaggagcgcgcatgaccgtcgccgctcagtcagcgacctgtcgattggcggagcctctatgcgcctgatgctctcggagccgttcaaaagcctctggcatggcaaggatccgttcgtcgaagtcgaacgtctcgatggtcaggtctaccgcgagctggaaggccggcgcaccctgcgcaccgaggtcgacgggcgcggatacttcgtcaagattcatcggggcatcggctggggcgagatcgccaagaacctgctcaccgccaaggcgccggtgctgggagccggccaggagtggcgcgccattcagcggctgcacgaagtgggggttccgaccatgaccgcggttgcctatggcgagcgtggcggcaatccggcgactcaacactcgttcatcatcaccgaagaactggcgccgacggtcagcctggaggacttctcggctaactggcgtgaacagccacccgcgccggcgctcaagcgcgcgctgattgccgaagtcgcgcgcatggctggcaccatgcaccgcgccggcgtcaaccaccgtgatttctacatctgccactttctgctgcataccgacaggccggtgacagcaagtgacttccgcttgtcgttgattgacctgcatcgcgcgcaaacccgagcccaaacaccgcggcgttggcgcgacaaggatctggctgggttgtacttctcggccctcgaaatcggcctggccggccgcgacaagctgcgctttctgcgcgattacttccagcggccgctgcgtgaagtcctgcgcgacgaggctgcactgctggcgtggctgcagcgcagggcggaaaaactgctggatcgtaagctgcgctatggggatgcgctttgatggcaggctggacgctcgatcctgcctacatcgacctgcatgatgacttttgcagcctggcaagcgtgttcgccctgcaaggtgagcgtctgacacaggatctgctatcagaagtcatccgcatcgagcgcaacggcgtgcgctactacgtcaagcgctactccggtgccggcaagggcctgcggcgttacctcgggcgaccccgggtcaaggcggagtggcagaacctgatgttgttccggcgctgggggatccccaccgcaccgatcgtggcttacggcatggagcggcgcggcggggcgtttctacgcggcgccttgatcacccgcgagctggaacaaacggaggatctggcgctgctggctgcgacccacgacgcccgccttggcgatccccattgggtgcaggaggtcagcctgcagctggcgcgctcgacgcgggcgatgcacgaccgcggctttgcccataacgacctcaaatggcgcaatctgctggtcgatccgcagcgtcgtctttatctgatcgactgtcctaccggcgcgttttggcatggtccgtttctgcaacggcgcatcgtcaaggacctggcgtgcctggacaaggttgctaagtaccagctcagccgaacccagcgcctgcggttctatctgcagtactgtcagcgcaagcggctggttgacaaggacaagccgcgtatccggcagattctgaattatttccaggggcgggaatgaacgatttcttggcacaggctgatcgtccgacgctcgagcggcacggcctggcgagcttcgatgcgctctggttggtgcagctggcggcagtggatgagcccaatgtcgagcgtggcggctggagcagtgttttccggctggaactcgatgactcggcgttctatctcaagcggcagagcaatcatctgacgcgcacactggcgcacccctttggggagccgacctttgctcgggaatttcgcaatatccggcgctacgcacggcttggcgtgccggcgctgcaggcgagtttcttcgggcagcgcaaggtcgccggcgaaaggcgtgccattctcctgacgcgtgcgctggatggatggatggatctggacggctggctgaagcggtggcccgggctggatgacgctcgacgccaggctattatcggcgcggttggtgggctggcgcgcaccctgcatttggccggacagatgcatggctgcttctaccccaagcacatcttcctgcgtgagcagggcggtcattggcaggcctgcctgatcgatctggagaagactcgcccgctgctgtttgggcggcgtgaccgcatcaaggacttggagccactcgtgcgacgtgcgagctgtgtcggcgagcacggcgtgcggcacttgctggagacctatctggacgatcctagcctggtcgagccatggctgctgcagttgcagcggcgacgcgaagccaaggaggcgcactgatgagattggccgatctgactgtcgccgggcgcgagccggcttgtcccgcacaggtcgagctgccggacggagcgattctgcatatcgatttgtggctgcgcattttgcctggccagcgctatgtcggtcgcgcgcattggaaggatcgccaggtcctggccaagcttgtcgtgggtggcaaggcgcagcggcatcatcggcgcgagatggttggcgcgcagctgctggcggagcagcagttaacgacgccggcactgattgcacagggttggcaggagggcgagggtggctggttgctgttcgactggctcgattcctccgaaagtctgtgggatgcctggcgctcggcagaggccgagcatgccctctcggatgggcagcgagacgtactcggtgaggcgcttgaactgatcgccaggatgcatgcgcaagggctctggcaggcggatctgcacctggacaatctgctcagggccgacgggcggctctatgtggtcgacggtggcggcgtgagggcagagacacccgggcagcctttgtctcgcgagcaggtgctggagaatctcggagtcttcttcgcgcagctaccggccgaaatcgagccgttcatcgaagagctgctggtgcactacctgctcgctaacagcgagcatgcgttgccactggaggcgttgctcaaggaaatccgcaagacccgcgcttggcgtctgaatgattacctcaaaaaggtcgcgcgcgattgcagtctcttcagcgcgcgtatcggtgcgttcggtgcgcaggtcatcaggcgcgatgaggaagcaggcttgcaggtcgtgcttgccgacccggatgcgttcatcgccaagggcaaactgttcaagaccggcggcgcagccaccgttgcgcaatgcgaactgcacagccgcgcactgctgatcaagcgctacaacatcaagaatccattgcattggctcaagcgcttctggcggccgagccgggcctggcacagctgggtcgagggcaatcgactcgactttctcggaattgccactccgcgattgatggcggtcatcgagcgacgctggctgtggatgcgcgggccggcatggctgattaccgaattgctgcgcggagaagatataatcgcgcgttttcagccatacctgaatgattgtccgcccgaggaggagctgttcgccctcgatcggctgttcgcagcgctgattcgcgaacgtatcagccatggcgacctgaaagggcacaatgtgttctgggagcaaggccgctgggcactcatcgatctcgatgcggttcagcagcatggcagcgacgccagcttcgcccgagcatatgccaaggaccgcgcgcggttcctgcgtaactggccaaccgacagcgccctgtaccggctgcttgaccaacgtttacccgcggtgcccggcaccagcatcgaagattaagaggcaatacccgtggcattgacgattctcggcctttccggcgccctcagtcatgatccttctgccgctctctacatcgacggcaagctgatcgccgccgtcgaagaagagcgcttcgtgcgtgacaagcatgccaagaaccgcatgccgtacgaatccgccaagttctgccttgagcaggcgggcatcaaaccgtccgacgtcgacgtggtggcgattcctttcgcgcctatcagcatcttcgaaaaagcgcgctggcactacgcaaagcgttactggtacgcaccggatcgtgcgctggatgccatccttatgggcaaccgccgctactaccgctacaagaaacgcattgaatggtgtctccaacagctcggcttcgacctgaagaaggtcaagctgcagccggtcgagcatcacttggcacatgcctccagcgcttaccactgctccggttttaccgagaagaccgcgatccttggcatcgatggcaagggcgaatacgccaccaccttctttggctggggcgagaacggcaagatccacaagatcaaggagttctacgatccggactcgctgggcggcctctatggcgcgattaccgagtacctcggcttcgagatgctcgacggcgagttcaaggtcatgggcatggcaccctacggcgatgccgccaagtacgacttctcgcgcctggcaaccttcgagaacggcgagctcacgatcaacaccgagtacgccaacgtcatcggcttccgtcgatacaaggaaaagggcaaaggctactacttctcgccgaagctgatcgagtggctggggccgaagcgcgagggtgatatcgccgacgacccctatatccattacgccgccgccatgcaggcgctgttcgaaaagcttgcactgcagatgatggactactacctgggcgacatcatccgtgagaccggcaagatcgccttcgccggtggctgcgcgctgaacgtcaagctcaatcagaagatcatcgcgcgcgaagaggtcaaggagctcttcgtccagccggcctccggcgacgccggtactgccgtcggtgcggcggcctatgtatcggtgcagcgcggtgtgccagtcgagaagatggagcacgtctacctcggtccgtcttattcgaacgaagatgtcattgcggcctgtgccaggcatccgaacaaaccgatgttcaagcagatcgccaataccccggaacgcatcgccaggatcatggtggacggcaacccggtggcctggttccagggccgcatggaattcggtccgcgtgcgctgggtggtcgctcgatcatcggctgcccgagcgtgccgggcgtggccgatcgtatcaacgagcagatcaagttccgcgagcgttggagacccttctgcccgtcgatgctcgataccgtggcatcgcagatgctcaaggtcgaccatccgagcccgttcatgaccttcaccttcgaggtcaacgagggttggaaggaacgcgtcggcgaagtggttcacgaggatggcacgtcccgcgcccaggtgctggagcgccggcacaatccgcgctggtacgacctgatgctggagctggaaaagctgaccggtaacggcgtgtcgctgaacacctcgctcaatcgccgcggcgagccgatgatctgctcgccgaccgatgcgctgaacatgttttatggctcagacctgcagtacctgatcatggaggatatcctcgtggtcaaggagggcaagggttggtatgacgccgtctgagcagtgggtactgcagttttgccacagctatgacgggccctttctcgattgcgcgcggcaatacgctgcacttttcgtaggcacgccgtacaaggtctgcactgtctacctgactggcgctccgagcgatgaggtggttcagggctctgcatctgacgaggtgatctttctcgattacagcagtcgtgacgtgcgcggcctgaagttgcgtgcgatccgggatattcgaaagctagccgcgacgcgcaatttcgctttctgtatcgctcatcgattcaaaccgatctacgtagcgttgttgggcactaagttgccggtgatgggcgtgcaccacgcctttggcgattaccagcgtcgttcgcgacagctgttcgccaacttcttccacaagcgcctggcgctgctaggcgtgtccaacgccgtgcgcgacgacatgcgtgcctgcttgcccgcttggccggctgaacgcatcgaaaccctctacaaccgcatcgatataactgccgtgcaggctgaacaggtctcacgtgaagaagcccggacattcttagggcttccccaagaggcttgggttgtcggcaacgtcgggcggctgcatcctgacaaggaccaggcaacgctgatccgcggcttcgccctggcgttatcccagctgccgactggaagttatttggcgatcatggggagcggttcgctggaggcctctttgaaggcattggcggcgaagcttggggtgggtgagcaggtgcgctttctcggtcaggtgccatatggtcgccgctatttcaaggcattcgacgtctttgctctcagctccgaccatgagccgttcggcatggtgctactagaagcaatggcagcggggttaccggtgatctgctcggattgtggtgggggtaaggaagtcgtcgacggcgttgggctgctgttcactcaggcagacgaacatgaattagcacatgccctgaagcgcggtgcgacgtcgccgcaagacgcctctcgaatcgccgaagctctgcagcgtttttctgatcagcgggttcgtgcctctttctggcggttgccgatggtgactcgcctaggcctgtcggcagcctagagggctgcggtgcaccagtaaagcgcgccttgctgtacacgccatgacgtaatcgggtttttccaagggtatctatcgtgtttaaggcgttgaaggcctctctttgcaggcgttggttacgcaggcgcggtttcaagttggctgtcgacattcacaccttgcccggcaaggccctgctggtgttggaagagggcgtttccatcggtgatgtgatgggcgccttcgagcacttgcaggtcggagccttgagttatgtgcgcagtgcgtctgaactgttgaatgtcacccggattgggcggttctgctcgattggcaactcagtcgttattggccaggaaagggccggtcatccgctgagctgggtcagctctcaccccttccagtacaccgggacctcattacactacgccgcttccggcaagtcggccgagatcggtcacgacgtctggattggccgcgaggcgatgatcatggagggtgtgcttgtcggtacgggcgcggtgattgcggcacgctcagtggtaacgcgcgatgtgccgccgtatgcagtggtcgctggaacgccagcgcgcatcctgcactatcggcatccgccggagatgatcgaagcgttgctagctagtgcctggtgggagctgccggtcggtgttctgcagggcttgccactggataagcccgaagcgttcctgagcgctgtcgccgagctgcaggagacccaacgggtatcctacaggcaagtcgaggtcagccgtcgggggtggcgcgagctgccgccggccgagtggcatccaaacgagtgcatatgatgagagtcctgtttctggttcaggccgaacagcgggcgatcttagatcgtctctacgaaggcattgagcaacattgcgattgcgatatccgctggctggaacgcgaggagcaggcgaacctgcgtcgttactttcgcgaccaggtggacgtggctcgctatgatcgcatcctgttctttctgcgcttcaagcaggaaattcggcaggtgaatttcattcgtagcgtgcctaacctcgtgatcctcgagcatgacgcctaccagaactacattccctgcaagtacaccggcaagttcacggcgcactaccggaagttgccttgggcgcgggtgatcagctctgggcaggtagtggcccggcgcttgcgcgacgaaggtgtagatgcagtgttcgtgcccaaaggctacgaccaggccttgctgcgcgacctcgggtgcgagcgtgacatcgaactgggtttcgtcggcagtaccaagagcgtcgcctacagcggccgcaaggcgctgctggacgagctggcgcaggtggagaacctggtggcgacccgcaccaagtccggcgaagactacctcaatgccctcaaccgcatccgctttttcgtcagcgccgatgtcggcatgggcgagtacatgatcaaaaacttcgaggccatggcctgtggctgcgtgttgctggcgtacgatcaaggcgaagaggaaaactgcgcgcttggcttcgtcgacatggaaaacctggtgctgtaccggacggttgacgagctgtgcggcaagctggcgcagctgcgcgccgatccagcctgggcggcacgtatcgcgaccagcggccgggtactggccgagtcgcgctacagtttcgctcgcatcggtgcccagatcgtgcaggccatgcaggcgcccttgcggcccgcgccaacacccagctggttctgccggttgcgcaatcgcttgggacgctgagcatgaccgcgccgcgcctgctgtttctcattccctattttggccgatggccgttctggatgccgttcttcctgcagagctgccgtttcaatccggacgtgcaatggctgttcttcactgactgcggtacgccacccaatgctcccgacaacgtccgcttccgggccatgagctttgcagactattgcgccatggtatctgcgcggctgcgtatcgactttcggccacaaagcccttacaagctctgcgatctgaagccggcgctggggtacgtgcatgccgacgaactggagagcttcgacttctgggggttcagcgatatcgatctggtgtatggcgacttgcgagactattttagcgcccagcgtctgcagcgtttcgatctgctttccacccatgagcggcgcatttctggccatctgtgcctgctgcgcaacaacgtacgaatgcgcgaggccttcaggcaggtacctggttggcaggcaaagctggcagccagtgaccacaatgccttcgacgaggcggccttcagtcgcctgttcattcgtcacaagagctggccgcagcctttacgaaggttggcagacgtctgtaatccttggcggcgctgcagcgagttcattgaagccttcagcacgcccaatggccggattgcatggcacgacggtagtttcgattttccaaaacgctggatttggcggcgtggcaggctaatcaatgaccgcgacggcgagcagcagtttccctattttcatttcatcggctggaagagcgatgcctggccagcctatagcgaacagtgcctacttggcgatgccgagctggctgcacaggatgcttggagcattactccccagggttttcgtgaggtttgaatcttgattttttccaaggacagtgaggtcaccctggtggtgactagttgcgggcgcttcgacctgcttactcggacgttggccagcttcgatgtcttcaatactttgccgatccgtgaagtgttcatcacagaggactcgggcgaaaagaaggtggaagcctgcattcctgagcactggcgcgagcacaccactttcttcgtcaacgtgccgcgactcgggcagatgcgctccgtggatctggcctattcccacatcaagacaccatgggtcttccactgcgaggacgattgggcattctaccggccgggtttcatcgaggattcacgggtgctgcttgaggccgatcggcaggcgttgcaggtttggttgcgaagcttcgcgcacgatctggcgattcacagcccatatgtttatctgggcgagcgccaagtggttcagggcatcccctgctatcgggtctgttcgtacaaagaagactggcagggcttctccttcaaccccggattgcgccgcctggttgactatcagcaacatgcgccctatgcacagcatgccggcgagaaggacctgtcgcgactatatgcgaacgagcagcgccatgcgttgatcttggagaacgatgctgtgctgcatacgggtttcgaagatcatgtcagcgtgccggaggagcgggccaagaaggcacggcgcaaaaagcatgagcggctgcgactggttttgatgttcattgtcggtttcttgtgtggagtaatagtgtgactgccgtgcagtacctgaagggattggaggggcggttcggctatttcgcaccagcgttgctgctgttcatcgccagttttctgttgttgccgaccagcaaaatggtcaacaacgtctattatatttttctggcgctgccggccctgggtgtgttgttggtgcgccggggacgcggtatacagctgtctcccgcattgtggctttggggcgctctgtgcgcttggttcgtgcttgttggcgctttgtcagcggatggacagtatttcaagcacgtgctctatacggccctgtttgtgctgttggtcagccagtttgtgcagcctgagccattgcgcattccgctgttcttccgcggactgttctggattttgggcatctatgtattgggctccgccatcatctattggctcactggtcgctatgtgccaggcgagcgggtgctttggctgccggggcggatgaccgggccgatttacaccagcatgtggctggcttgttgcttcgccctggcgctaccgacctggctgactcagcggcgttggctggagctgtccgcagcgacgctgttggcggtgttctgcatggcttatgtactgcagagccgctctgggctaattggcatgctggcggttggcgccctgatcgccggctggctggtgttacatcgggcgcgctatctgctgtggctgggtttcgcgagtgtgctgcttgtcttattgacgctattcgtcatgcgcgaggtacccgaggtcgcgcgtcttttcgaacgtgccgattctggtcgtttcgagctgtggcgcatccttgctggagagtggttggaatgcggcctgtggctgggttgcggcatgcagcatgtcaccgaggcaaccatccgcggcggcgcgccgatccagcatccgcacaatatctacatggccctcggtctttacagcggcctcgtgtctttgctgatattcctcgcgctgatgatcgtggtgctccgacgcgcctggcaacagcgtgatccctggggactctatctgtttaccgccttggtggtgctgaacttcgacggcagcaagctggtcggcaaccctgacgagctatggttgctggtgttgctgccggtggcgttgatcattaaccgccgcacggtcgcctcgtaatcgcttctgttggacggaggcgtctcagcgacgcccggcccgtgtagcttcgcagcaggcccaaagagacgcgctgtcgaaagggaaaccttccttgcgcagatacttgtcgaagtgctcgcggttgcgccggaccaggcgtgctcccagcgggcgccgccggtttttcaggtcagcgatgtcgatcaggccgagttggccttccggggtgcggacaatattgcccaggtgcagagagcggaagtaaacaccgttggcgtgcaggtgattgatgaagcgtgccagctcgggttgcagctccgtccaagagatgcgctcgtcgcgcaggagctgggacagagtatcgccgggcagtggtcgatagagcacggctgtccagtctggatcatccaggcggtacaggtggagtggttgcaaggtcggaatgccaagcgcctgcagagcgatggcgttggcgcagaagcgtcgtgagtgggggcgcagcagtgccgaagagagcaggcgtttgcgtcggaacagcttcagcatgttgccatcacgcagtcggtagaccttgggaccaaagctgtcctgctccaagatccgggcgccgtcgatcatttcgttcagcatggctgcgggcaggggggtaaacgtcagcacgtatcggcgcctcaataatgatcgggggcggcatatgatgcccgatgtcggcggggcgcggccatgccagcgggagtgttaagattgccgccactattccgggcgagatccgtcatgacagaaactcccaggcaggaggctgcttccagcctcaagatctatttccgcctgctggcctatgtgaagccgtacataggctatttcctggtcagcatcatcggctatgtgatctttgcctcgacccagccgatgctggcgggaatcctcaagtacttcgttgacggactgagcaaccctgacgccgcacttttcccgggtgtggcttggctcgctgagctcccgttattgcacgcggttccgctgttgatcgtgctcatcgctgcctggcagggtttcggctcgtttctcggcaactattacctggctcgcgtctcgcttggcctggtgcacgacctgcgcgtgcagttgttcaacagcctgctgacactacccaatcgctattacgatcagcacaactcaggccacctgatttctcggatcaccttcaacgtgaccatggtcaccggcgctgcaaccgatgcgatcaaggtggtgatccgcgaggggctgacagtgatttttctgttcgcctatctgttgtggatgaactggatgctgacactggtaatgctggcgatactcccggtcattgccgtagtggtgagcagtgccagcaggaaattccgtaagcagagcaagaagatccaggtggcaatgggcgacgttacccacgtcgcgtcggagaccatccagggctatcgagtagtgcgtagctttggtggtgagcgctacgagcagctgcgtttcgtggacgccagccagagcaataccgacaagcagttacgcatggtcaagaccggcgcggtgtataccccgaccttgcaactgctgatctacagcgctatggccgtcctgatgtttctggtgttgcttttgcgcggcgacgcaaccgcaggtgacctggtcgcctatattaccgccgccggcctgttgccaaagccgatccgccagctgtccgaggttagcgccaacattcagaaaggcctggccgccgccgatagcatcttcgaacagctcgacgaggagccggaaatcgatcggggtacgcttgagcgcgaagccgtcagcggccatcttgaggtacgtaacctcgacttcgtctatccgggtaccgacaagcaggtgctgcgcgacatcagtttcaccatcgaacctgggcagatggtggcgctggtcgggcgttccggcagcggcaagtcgacactggcgaatctgatcccccggttctatcaccatgaggccggtcagatattgctcgacggtgcagatgtcgagtcctacacgttgcgcaatctgcgtcggcacattgcgctggtgactcagcaggtgacgctgttcaacgatacggtggccaacaatatcgcttacggcgatctggccggcgcgccgctggacgacatccgccgtgcggcccgtgatgcatacgccgacgagttcatcgagcagatgccggagggttatcagaccctggtcggcgaaaacggcgtgctgctgtcaggcggtcagcgccagcgtctggccatcgcccgtgccttgttgaaaaactcgcctgtgctgattctggacgaagccacttcggcgctggataccgagtccgagcggcacatccagggcgcgctggatcatgtcatgcagggccgtaccacgctggtcatcgcgcaccgcctgagcaccatcgagaaggctgaccagattctggtgatggagcaggggcgcatcgtcgagcgcggtacccacgccgagctgttggccgtgaacggcgcctacgccaggctccacgcgacgcagttcaaggacgaagtgcccgaagagcaggaatcctgatgttgcagttcctgcagagctggcgcgagcgtggctggcgcgttatcgacgcatcgacgtatgccgaggtctggcagcgctacggtggcagcgttgcgactcaccctggcgtcattgaacgcctggcccgactcgccgatataccggtgcgctatctggcttgggagcagcagggcgagttgatcgcagcggttccctgctggggccggcatctggcgctttccaaggatgtgctgaaaaagaccggcaaacgcggcctgttcgatatgggcaacgcggagatcattctgccggttgccgagcgggccgatgtgccggtacgccagcgtatgcgctacgtgtccgagctgaatgctgctgcgatcagcacgttgcgcgagcagcctgagggtctggcgctggcgcgcgagccggaggcgtattcgaagaaattccgctacaaccagcgtcgtgagcagcgtttgctggaagaggccggcggtgtactgcgcccgctgctcgatttcgcgccgaccgagcaagcggcaatgtacgccgatctgttccagcgccgatggggttttgaggcgcccggtaaggcgcatcttcatgaagtgttcgaacttttgcgcgaattcatgaccggctcggtggtcctgctcgacgagcagcccattgccgtccaggtgctttaccgggtcgaggcaccgaagtgggtgtccatcgagtacatcaatggcggtgtcgatccgcagcagcgggatttcagccccggcagcgtcctcagcttcgtcaacacccagacggcctgggccgaggcacgggcgctgggcaaaccgctgcgttattccttcggccgtgcggaccgcgaatataaggaccgctggtgcaaccgagttccggtctatcaggtgtgatccatgagtgcacgcaagcagcaattgcttaaacgccaccgcaagcacaagcgcatcgcgttgctcatcgcgctggttgtgctgctgctgattggcacgctggtcgcctggtggccggtgccgctgctggtggttctgggctggatcgcccatgaggcatggtttgccgatcatctgttctaccggccgcaggacgactaccgctacgcctttcctgaagatgccaagcgctatccggtgcgcatcgaggatggccgtctggtgctggcggacgacttcgaggctgcagatacgctgattctcgaggtcaatctgaagggcagctggctagggcgctggcgcgacccacaggtatggatcggtgaggaccgtcaggatttcgagcgcggtgtcgcgggtcggcgttacctcaacctttccggtcagcacgagctgctcgtccagggtaggctgagcgttcgcgggcgtttctgccagctctcgaatgatgcgaccctctatgcgatgcgcaatccggactacgccgagcgccgcattcttatcatcgccccccacgccgacgatgccgagctggccgcttttggcctgtacagccgagcgcgcgacgtcgccatcgttaccctgactcagggggagatcgaggcgaagaactaccaacgcctggatttggaccaggccgctgcggcgcgcttgaagggtcgtctgcgcagctgggacagccttgcgatcccgctctggggcggcgtgccgcaatcgcaatgcgtgcagctcggctattactgcctgcagttgccggccatggctgaggagccggaacgcgccttcggttcgcgggaatcggacgagcaggacatccgcagcgtacgccagcacaatcctctggctctaccggcggatggggacggcgtgccgagctgggacaacctgcaggctgacctgcgcgcgctgctgacgcactttcgccccgaggtggtggtgacgccgcatcctgaactcgatccgcactccgatcacgtcgcagccacgcgagccctctgtcaggcgatggaagagggtgattggttaccagaaacgctactgctctatgccaaccatctacatgataacgaccgctggccgatgggcccggctgacggcggcgtggccttgcctcccgccatcgagccgctgccggtcgatcatctatggagcccgacgctggatgcggacacgcggctgaacaaggccatggcactggccatgcagcatgacctgcaaggacctttgccgtttaagaggcgcctgcgtcgattgatccaggcggcactagccggtcgccgctggccggcgagtggcgacgacgagttcttccgcaaggccgtgcgccgccacgagctgttctgggtgcgcaagttgtagcagtcttgccgcgctggtcaggccggggttgtccacagtgttattatcccgccgtttttctcttcctcgctggagcccccatgaagctgtccatgccccgttttgaccaagccgccgttctggtggtcggtgacgtcatgctcgatcgttactggcatggcggcacgtcgcggatctcgcctgaggcgccggtgccggtggtcaaggtcgagcagatcgaggatcggcccggtggcgcggccaacgtggcgctgaacatcgcggcactgggtgcgccagcggcactggttggggtgaccggtgaagacgaggcgcgccagagcctggccgacagcctagccgcggcgggtgtgaacgcgcatttccagtgcattgatgaccagcccaccatcgtcaagctgcgggtgatgagtcgtcatcagcaattgctgcgcatggatttcgaggagccgttcaacaccgatccggccgcgctgctggccgaggtggaagggcagctgaccggcgtcaaggtgctggtgctgtcggactacggcaagggcgctttgaagaaccatcaggcacttatccaggccgcgcggcgtcgtggcattccggtcctcgccgaccccaagggcaaggactttgaaatctaccgcggcgccaccttgatcacgccgaacctgggcgagttcgaggcgatcgtcgggcattgtgccgatgaggccgaactggtcgccaagggcgccgagctgatgagtcggctcgatctggatgcgctgctggtcacccgcggcgagcacggcatgacccttctgcgccctgatcacgcgccgctgcacctgccggcccgtgcgcgcgaggtgttcgatgtcaccggtgccggcgacaccgtcatctcaaccttggccgcagcgatcgctgcaggcgaggagctgccgcaggccgtggcactggccaacctggccgccggtatcgtggtcggcaagctgggcaccgcctgcatcagcgcacccgagttgcgccgcgcggtacagcgcgaagagggctccgagcgcggtgtaatgaccgtcgaacaactgctcactgcggtcgaggatgcccgtgccgagggcgagaagatcgtcttcaccaatggctgtttcgatatcctgcacgccggccatgtgacctatctggaacaggcccgcgcccaaggcgaccggctggtggtggcggtgaacgatgatagttcggtgagccgcctcaaaggcccgggtcggccgatcaactcggtggatcgccgcatggcggtgctggccggtctggaagcggtagattgggtggtgtgcttctccgaggacacgccggaaaacctgctggcccaggtgcgccccgatgtgctggtcaagggcggtgattatggcgtcgatcaggtggtcggtgccgagttggtcaaggcctacggcggcatggtgaaggtgctggggctggtggaaaacagctccactaccgccatcgtcgagaagattcgcagccgctgagccatagtgaccagatgccgcgcggtcgggcttctcagcgcgccgcggcggccggcctggctgcccaccagtccttccagcgtacccgctcgtcgcgcaccacccagccctgctgtggtgcaaagctctccgacagccacaaccctcgtgtattgacggggctgaactggccatcacgtaactgcagcagttgctcctgcggctgtccctggtgcagcgggatcaggtagaggtcgggcctgcttcgctgcagacgcgccaccagcttgtcggcctccaggcgttcgtcgacgtggaacagactgagctggcgaacctctttcggcagttccatgcgcatgtcgtagaccagctgcagcgatgccgtcggcaggtgcacgtaggcgcgcgggcgttccatcagcaccatgttgccgcactgcaccggccgcgtggcgccggattgcgaggcgagcttgaaatgcactgcctcgcggtagtgcaggctggtctgatagggcgtgggcaaccaggtgtcgccgaaacgcccggccagccagccttcgggggtctccagcaggcattcttcggcgatttcctggatggcggtgagcagtggcaggttcagctcatgtgccgggatatagccggaaatcagcttgagcaccacgtcgccgcggtctaggcgctgctgacggaccagcacccaatattcccggccctgccagcagagggtcaggcggaccgaaacgcccagattggccagttcgatggcgaagcggcccggatcggccacctcaaccgggcgccggcgcgcgatgacttcggcgaaattcagcggccgacccaggctctggtagctcaggctgtcatggccagcctcgacgtagaggggcagggtcttgaatgcggcagggctcttgcgtaccagaacactaggcattcgggctctccttacggcgaacgggaccgcggcgcggcaccggtggctgctgccgcgcagcgattggaacgctgcgcctccgagatcaattgcccgtcaggacggcggcagcagtggctacgttagacgtcaaatgctgcggattgatagtgccgatgatcgcgccgctgacacctgggtgaccgaacagcagctcgaaactgcgacggaccgggtcgtcgcctggcttgaggcaggcatgtccgctggccagggccttcttgatcaggatgcccttgccgtgggctgcagcgtagtcgaggaccggccgttcggcctgctcgttgaggttgtaggtgaccatcgcgcagtcgccctgctgcagtgccagcagcccgccatcgaccgtcttgccggacaggccgtagccgaggatcttgccctcgcgcttgagctcggccagggtctggtagacctcggcgtgctgcaggatgtccagatcgttgccatcggaatgcaccagcaccagctcgatgcggtcggtgcgcagacgcttgaggctgcgttcgaccgaaaagcgcgtgtgcgcggcggaaaagtcgaagcgcgactggccgttctcgaactcctctccgaccttgctgacgatcacccactcctcgcgctggccggtcagcagcggaccgagccgctcttcgctgaccccgtaggctggggcggtatcgatcaggttgatgcccagctcgcgggccagagccagaagctggcgagcctgggcgtcgtcgggaatggcgaagccgctggggtatttcacgccttggtcgcggcccagcttcaccgtgcccagacccagcggcgaaatgcgcaggccggtgctgcccagcgggcggtgcagttcgtgcagcgtcgtgctcatggcagcaggccttcccagaaaggcccggtcagcggcggacgtggcagttcaggtagtgtgggatgctggccggggcgaatgccgtcgcgggcgagggcggcttcgacgcggtcggaaaagtccggtgacaacgccagcttggtcggccagccgaccagcagacggctctgctcggcgagaaaggcgttatccggacgggcgagcgccgattgcgccggctcggcgcggtcgatacgcagcgtggcccagtgcgcggcagacagatcgatccagggcaccagttcggccagttcctttttcgccgcggcgatctggctggcttcgtcccgcgccacgccgtcggcttcggccaggtcgccaccgagataccagacccactcgccatccgccgccggatggctggtaacggtgatgcgcggcttggtgccgccgcccagacagtgagcgtacagtggcttgagcgtcggcgccttgacgatgaccatgtgcagcgggcggcgctgcatggccggttgctgcaggccgagcgacgcgagcagctcggcaattccgccacctgcgctaaacacgatgcgctgggcgcggatctcgcggccgtcgacgcgcaggccgaccagctcgccaccgtcatgcagcggctcgatctgctgaccagccagcaggctgtcgccggccagctcagccaggcgggcgatcaggctgggcacatcaagcaccagttcactgaggcggtagaccttgcctttgaattccggatgctgcagcgcgggcggcagctcttcgcccttgacctgaccaacccgcgagcgcaccgccttgctggcgaagaagctggtgaggttgccggccagggtgcccggcgaccacagatagtgcgcatcggacaacagacgcacgccgctgaggtccagctcgcccgtgccttcgagggcttcgcgccagcgccgcggcatgtccgcaatcgcctcggaggcgccggtaagggcaccgctcagcgcgtacttggtgccgccatgaatgatgccctgggacttcacgctctgcccgccgccaagcgttcccttgtccaccagcaacgtggcaaaaccttgtctgcgcaggcgcgcgttgagccagaggccggcgacgccgccgccaacgatcaggacgtcggtgctgaggggttcaggcatgtgcagacctcatacggggaaacggacgcgcagtataactgcatgcagttcgcggggtgctcagtggccggtgctgccggagaacagctgaatgaccaccacgccagcgatgatcagggccataccgagcactgccggcaggtccagataccggcgatagcactgctgcagcgatgctgaccagcacgatgccgagcccggcccagatggcataggcgatgcccaccggtatggttttcaccacgagagccagcatccagaacgacaggctgtagcctgtgaccaccagcagcagtggcagcgggcgactgaagccggccagcgccttcatcgaagtggtggcgaccacttcggcgcagatggcgatggccaggtaaacgtagccggacatggcgagatcctgattatgggcgggcaacttcgttcggttccgacctcgccaacaagttcgcgggcagggcggttatggctcgcgagcaggcggcttgctaagctccgcgcccatgaatcgcaccctctataccctgctgttccacctcggcctgccgctggtgttcctgcgcctgctgtggcgcgcctggcgcgccccggcctactcccgtcgtatcggcgagcgtttcgccttcggtttgccgcggctgcgtccgggtggcatctgggtgcatgcggtctcggtgggcgaaagcatcgccgcggcaccgatgatccgccagctgatggcgcgctatccgcagctgccgatcaccgtcacctgcatgaccccgactggctcggagcgcatccaggcactgttcggcgacagcgtgcagcattgctacctgccctatgacctgccctgggcggcggcgcgctttcttgaccgcctgcggccgaagctagcggtggtgatggagaccgaactctggcccaaccatattcatcagtgtgcccgccgcggcattccggtggcgctggccaatgcgcggctgtccgaacgttcggcccgcggctatgcgcgcttcgcccgcctgaccgcgccgatgctcgccgagctgagcctgattgccgtgcagacagaggctgaggccgagcgattccgtcagctcggcgcgcgccgtgagtgcgtcgaggtgaccggctcgatcaagttcgacctggccatcgacccggcactgctggtgcgggccagtgaattgcgccagcagt

SEQ ID NO: 91 - DNA, 6719 bp, Unknown
  From metagenomic library of CO183
acatccgcatggcctgcgcttgccgtggtgttggctatgtcgttctcggcgctgcagcctgccgtcgccgccgacagcctcgcctcggagcgtgagcagctcgccgcgctcgcccgccaactcgatctgatcgaccgcctcgccgagcacgccgccaataccgctccgcaggaacgcgcccgctaccacttcgactacgctcggctgcgtgccgacctgaagcgcgttcgcgccggcctgcaggactacctcgtgccccagcgcgcccagccgcgcgatcccgtcccgctggccggcgattacgtccgccgcgaccgcgccgacgacgaggagccgtcgccatgacgccctctgccgatcaggtcgccgccttccaggccaacggcggctttgcgccttcggccgtcgctgccgtggtgctgggcttcgtgttcgccgtgttgctgctgtggggcgtgtgggccatgcgcaccgcctacgccggctgggccgagcaccgcatcaccgaacgtcagttcctcgccgtcgtcgtgcgcttcgtggcgatgtacctggtgctgaccttctttctcctctcctgaccgtcacgaagggccatacgtcatgaacacgccaacgacatcccatcgcattccgtcccgcatcgccgctccgctgctgccgctggcgctcgcgggcctgccgctgtcggccttcgcgcagggcctgccgaccatggaggacccttcgcgcggccagggcagcggcatcctgcagaccttgcagaactacggctacgacatcgtgctgctgatcgcgctactcgtggtcgcctcgatgttcgtcggtgtctgctatcacgcctacacgcgctactcggagatccacaccggccgcgccacctggggccagttcggcctgacggtcgccgtgggcgcgatcctgctggtggtcggcatctggctgctcaccaaggccaccggcgtgctgtaagggcggcaagcgatggccgtcccttcggagactccgcgcgacaccctggtgaccttcctgccgcaccgactgaaccgccagccggtggtcgtgcgcgggctgaccgctgacgagttgtggatctgcgccggcctgtcggccgcagccgggttcgcgctcggcctgccgctggcctggctcacgcacagcatcgccatggtgcccacgctgatcgtcgtcggcatcgcgctgggcgtcttcgtcggcggcggtttcctgcgcgcgcagaaacgtggccggcccgacacctggctgtaccggcagctccagtggcggctggccctgcggcatccggcgctggcagcgctcctgggcggccagcgcctcatcacccgctcgggctactggacgacccggcgcaacgccgatcgaggggcgcaatgagcgcacccgcacggccccccgaagggcgcgcgaacctccctcggggaggatgtcgcgtcagcgacaggagggtagttcagtgagccgtttcaagaacgaggttgcgcacctgcaggcgcatgtgaagacgctgcgtctgggggccggcgcgttgttcgtggtggcgctgctgctcggcttcggttggtggagtgcgccgaagagtctcaccatccatgtgccgccggacttgcgctcgggcagcacgcgcaagtggtgggacgtgccgcccgagagcgtgtatgccttctcgttctacatctggcagcaggtacagcgctggcccacgaacggcgaagaagactatccgcgcaacctgcgcgcgctgtcggcctacctgacgccgagctgccgggccttcctgcaacaggactacgagtaccggcgcgccagtggcgagctgcgtcagcgcgtgcgcggcatctacgagattcccggccgcggctacggcgatgatccggccacgcgcgtcaaggtggtttccgaccgcgattggatcgtcacgctcgacgtgagcgcggacgaatactacggctccgagcaggtcaagcgcgccctggtgcgctaccccatcaaggtcgtccggctggacatcgaccccgagcacaaccccttcggcctggcgctggactgctacgccagcgcacccgagcgcatcgaaacgccgccgagaccgatccaggccggcgcgcccgccaacgcctccggccacctgcagggagactccccatgaagtccgttgccttgtcggccctggccggcgtcctgctgaccctcggtttcgtgccggccagccaggccgtggaaatcctgcgctgggagcgtctgcccctgccggtgccgctggtggtcggccaggagcgcgtggtcttcatcgaccgcaatgtgcgcgtcggcgtgccggccagcgtcggcgaccacctgcgcgtgcagagtgcgggcggcgcgatctacctgcggacgagcgagccgattccgcccacgcggctgcaactgcaggacgtggaatccggcgcgctgatcctgctcgacatcgccgccgagccggcgaaggacggccaggcgccgctggagccggtgcgcatcgtggaagcggaagcccccgcgaagcgctacggcggcggtgcagcaggcggcgcggacgagcaggccgatgcgcccgcagacaaatccgttccccggcgcgaaacgccggtaccggtcgtgctgacgcgctatgccgcacagaacctgtacgcgccgctgcgcaccgtcgagccggtcgccggcatcgggcgcgtgaacctgcgccgcggcctcgcgctggacaccttgctgccgacgctgccggtgcacgcgcgggcactggccgcgtggcgcctggaagaccagtgggtgacggccgtgcgactcaccaacaccgccgcgcgttggctcgacctcgacccgcgcgccctgcaggggaacttcgtggcggcgaccttccagcatccgaacctggggccggccggcaccccgtccgacaccacggtgctctatctggtcacgcgcggccatggcctggccgagtcgctgctgccggcgctgagcccgatcgacgccaccgtgaacctgccgccggccgccgcggccggctcgaccggaggagcgcgcgatgaagagtaatccgctgctcaagtggctgctgatcccgatggcgctgctgctcgtgttcgtcggcatcaaactgttctccggcgcccccggcggccagcccgcccccaagggcacggccagtacgctcacgcccgaggagatgaaagccctgggcatcgcaggcgacacgccgcgcgataccgtcgccacgctggttgcccaggtgaagcagttgcgcaccgagctgcagagcgcgctcggcgacaacaagcagcacaaggccgagaacgagcgcctgcgtgcgcgggaaagcgcgatcgaccagcgcatccagagcgcgctggaaggcgaacgcaaccgcctggagcaggagcgcaaccaggtggccagcgacaggcagcagacccaggggctgctgcaggatctgcagcggcaactggacggcctttccggcaagggtggcccttccgacctgcccgtcggactggggttggaagagggtgacggcaagcgcttcaaccgcggcaccagtggcacgcagtgggtcgagcccgacgatgccaaggtcgacgccaagaacggcagcaaggagccgagctttcccctgagcttcgggccagcccagaaaagcctgtcggccgcagtggaatccgtcgccgacgtcggcagccgcgcggtgggcgcatccacgaaggctgtctacaccgtgccatcgaactcgacgctcatggggtcgattgccatgacggcgctgatcgggcgcgtgccgatcgacggaaccgtcaacgatccctatccgttcaaggtgctgatcggcccggacaacctcacggccaacggcatcgacatccccgacgtggccggcgccgtggtcagcggcacggcctcgggcgactggacgctctcgtgcgtacgcgggcaaatccgctcggtcacgttcgtgttccaggacggcaccatccgcacggtgccggaggacagtagcaagggcggtagcagcggcggcaactcggggcacaacggcgccagcatccagggcggcctgggctggatcagcgacccctacggcattccctgcgtcagcggcgagcggcgcagcaacgctcagcagtacctgggcagccaggcgctcatcaccgcggccggcgcgggcgccgcttcgctcatcaagtccgacaacggcagcgttgccgtgatcgccaacagcaacggctcgctgggcactgtcggtatcagcggtaacgaagcgatgggccgcatcctcgcgggcggcgtgcgcgacatggccgattgggtcaacaagctctacggccaggccttcgcggcggtctacgtgcagcccggcgccagggtggccgtgcatctggagcaaccgctcgacatcaactacgacgccaaggggcgtcgggtccaccaccgcaccggagaagcccatgcctcggatctggattgacgcggccgccgtgctgctggcggccacgctgcttggcggctgcgccaccagcaaggagaagctgctgccgcacggcgacagcaccatgctcgacatctggcatcaggagaccggcggcagcgcgggcagcggccaggccgcgcggcaactgctcgatgcgcgccagggcctgcgccggccgctggccgatgccgatgtgcaggcggcgcccggcgtgcaggcacgctacacccgcaccgcgcagaacgagatttaccgccagttccaccgcctgccaaatcccgacttggtgatgtacgtgttcccgcacctggcgggcaccgacccggtgccggtgcccggctacagcacggtgttcccgctctaccagcgcgtgcagtacgcgatgccgggcgagcgcgtggaggactactgatggcctggtcgctgccgtggtcacgcaagcccgacgcatcgcctgctgacgccgtggatgcggccgatgatgcctgggcacggcacgtaacggcgctggcggcacagggtgtcgccgagccgggcagcgcgctcggccggggccggcgcaggccggccacccaggccgaccacgatgcgctctatggcgtcgcgccgtcgttcgcggacttgctgccctgggtcgagtacctgcccggcagcaagtgcatgttgctggaagacggccagtcggtggcggccttcttcgaactggcaccggtcggcaccgagggccgcgagatggcctggctgtggcaggcgcgcgatgcgctggagaacgccctgcaggacgccttcgacgagttggacgacaacccctgggtggtgcagctctacgcacaggacgaggccgactgggacaactatctgcgctccctggcgaactatctgcagccgcgtgcgcagtgcagcgcgttcagcgacttctacctgcgcttcttcgctcatcacctgcgggccatcgccaagcctggtggcctgttcgaggacaccacggtgacgcgcctgccgtggcgcggccaggtgcggcgcgtgcgcatggtggtctaccgccgcacgtccgcggccccggccccgcggcgcggccagtcgcccgagcaggcgctgaccacgatctgcgaccgcctcgcgggcgggctggcgaatgccggcgtgaaggctcggcgccttggcgcggcggacatccacgcctggctgctgcgctggttcaacccgcatccgaccttgctcggcgccactgccgaagaccgcgaacgcttctacgcgctgacccgctacccggaagagcgggaggagggcgagatcgaactcgccagcggcaccgacttcgcgcagcgcctgttcttcggccagccccgttcggacgtgcccaacggcctgtggttcttcgacggcatgccgcatcgggtgatcgtgatggatcgcctgcgcacgccacccgtgacgggtcatctgacgggcgagacgcgcaaaggcggcgatgccatgaacgcgctgttcgatcagatgcccgaggacacggtgatgtgcctgacgctggttgccacgccccaggacgtgctggaggcacacctcaaccacctcgccaggaaggccgtcggcgagacgctggcctcggagcaaacccgccaggacgtgcagcaggcgcgcggcctgatcggcagcgcacacaagctctaccgcggcgcgctggcgttctacctgcgcggcggcgacctggcccagctcgatgcgcgcggcctgcagctcgtcaacgtgatgctcaatgccggtctgcaaccggtacgcgaagaggacgaggtggcgccgctgaacagctatctgcgctggctgccgtgcgtgttcgatccggctgccgacaagcgccagtggtacacccagctcatgttcgcgcaacatgcggcgaacctggcgccggtctggggccgcagccagggcacggggcatccgggcatcacgttcttcaaccgcggcggcggcccgatcaccttcgatccgttgaaccgcctcgaccggcagatgaacgcgcacctgttcctgttcggccccacgggttcgggcaagagcgcgacgctcaacaacatcctgaaccaagtcacggcgatctatcggccgcgcctgttcatcgtcgaggcgggcaacagcttcggcctgttcggcgacttcgcggcacgtttgggcctcaccgtgcatcgggtgaagctcgcgccgggcgcgggcgtca

SEQ ID NO: 92 - DNA, 27576 bp, Unknown
  From metagenomic library of CO183
aatctacccggcggttttcccttcacgccgggccgcgaagtcgcgggcgtgatcgaacggatcggccccggggtgaccgcttttcaaccgggcatgcgggtagtggcgaacatgcataccggcggttatgccgaatatgccattgcgtcggccggtgagttggtgctcctgccggacagggccgatttccagcaggccgtggtctacaacatcaacctgcgggtggcttacctctattaccacaccttcggcaacgtccagccgggcgaggtcatcctggtccacgccgcggcgggtggcatcggcggcctggtgacccagatcgccaagcggcgggggcgcaacgaggtgattgcgctggcgagttccgatgaaaagctcgccttttgccgcgccaacggggcggatcactgcatcaataccagccgcgacgactatgtcgccgaagtgctgcgcattacgggcggacgtggggtcgacgtctcgttcaacagcgtcgccgggccgacgctggcgaccgacccgcacgccatccgcccgctcgggcgctggctgatcaacggctatgcgggcgggcgagccttgctcgatcccaatgccatcatgcccaagtccctgaccgtgaagatcttctctgtctactcggtcttcggaaccgaggagttccgcaaggcgaccgagttcttgcaggactggttgcaaaacgagccgctcgaaggctgttcctgcacctttccgctggaggaagcagccgaggctcatcgctggatcgaaagccgtcagtcgcacggaaagatctgcctcgtcccctagcgcctgtcaggccgtctgcaaccgaagaatcacaaggaaaatcccatgagcgaatacagagctcccctccgcgatatgcgctttgtcatgcgggagctggcgcacctcgatgacattgcgcagttgcccggttgtgacgcggccagccccgacactgtcgaagccattctcgaagaagccggcaagttcgctgccgaggtgctggcgcccctcaatcacagcggcgattgcgagggtgcggtctggcgggacggcgaggtggtcatgccgaatggcttcaaggaagcctatgcggccttcgtcgccaacggctggaatggaattgcctgcgagcccgaattcgggggccatggcatgcctaagctggtcaccgcggcggttcgggaaatctggaactccgccaacatggccttcgggctgtgcccggcgctgaatgctggagcaatcgaggcgctgtcactgtccgcctccgatgcaattcagaaaaccttcctgcctcgcatggtcaccggcgagtggaccggcagcatgaatctcaccgagccgcaggcgggttccgatcttgcctctgtcaggactcgcgccgagccccagtccgatggcagctatcgtatttacgggcagaaaattttcattacgtacggtgaacacgacctcgccgagaacatcgttcacctcgttctcgcgcgacttcccgatgcaccggggggaacgaagggaatctcgatgttcgtcgctcccaagtttctggtccgcgaggatggcagcttgggcgagcgcaatgacgtgcattgtgtctcgatcgaacacaagctcggcatccacgcgagcccgacctgcgtcatgtctttcggcgacaagggtggagcgaccgcctatctggtgggcgaagccaaccgcggcctcgaatacatgttcatcatgatgaatgacgcccgaatggtgagcggcctgcagggactcgcggttgccgagcgtgcctaccagcaggccgcagcctatgccaaggagcgcgttcaggggcgggacatcggcggcggacgggagtcggtgccgattattcgccaccccgatgtccgtcgcatgctgctggaaatgaaggcgtacacagaagccatgcgcgccctggcctatgtcgttgccgccgcgctcgacgccgccgagtcccatcccgatccggagcgccgtgctgccgagcgtgccttcgccgcactgatgaccccggtcgtcaagggctggtgcaccgagaccggcattgaagtggcctcgctcggcatccaggtccatggtggtatgggctacatcgaggagacgggcgccgctcaatatctccgagatgtacggattaccgccatttacgagggaacgaccggaattcaggccaacgatctgatgggccggaagatcgcggccgacggaggcgagaccgccgcccgcgtgattgcacagatccgcgcccttgcgaacgatttgtctggttccacagatcgggatcttgcggctatcggcaaagcgctcgatgcagcggttgcggcgctggccaccgcggtcgaatacgttgtcgccaattaccggcagaacgtgcacgcgactgcggtcggcgccgtgcccctcctgaagcttttcggcaaggtcgccggagggtggctaatggcgcgagcagcgaagattgcggtcgagcatcgcgaggcgggcgacgccgagttctacggcgcgaagatccagactgcacgctattactccgatcacgtcctggcggtggctccagggctggcaacaattgtctgcaatggtgccggctacgtcatggaactgcccgagacgcaattctgaaacgtagcgtttgcaggggaatgactatgaaatcgagattggaaggcgctgctatcgagcagctcttcgggggcgcacgtaccgtcaaccgcttcatcgatcggccggtatcggacgcaactctgttggaattgtacgagcttctgaagtgggggccgaccgccgtcaattcgcaacccgggcgttatgtctttatccgcagcagggtggagaaggaaaggctgctaccggcactcgccggcggtaatgtcgagaaaacgctgcgttcaccggtgaccgttattgttgctgccgacaagcgctttttcgaccacttgcccgatcagttcaaggggtttgacgccaagccaatgtacgaagccgccccggaactgacgcgtgaaaccgctctgcgcaattcctccatgcagggagcctatctcatcatggcggcgcgcgccctcggtctcgattgcggtccgatgagcgggtttgacgctgccaaggtcgacgctgcgttctttccacggggcgaatgggcgagcaattttttggtcaatctcggctatggcgattctcaattcaattttcagcgtggtccccgtcttgaatttgacaccgttgcgcggcttctatgacgcagggcacggacggctctagagccaattaaatcagtgaatagagttgacataagtgtacggtttgtcaaaatataactgtacgcggatgtcaatattgattgattagttcggacgcaatcgcggcgctcgcaggccaggaggcaagcaccgatcgcaacaggtggcgcccgggtgatcgagaaagcgccggctaaatgaggcaggacgttatggaaaaaggctggtacctgattattgatgtcgccaaatgcgagaattgtaatagctgcgtcgtggtaacgaaggacgagtatatcggcaacaatttcccaggatactcggcgccgcagcccaaacacgggcacaactggatccgcatccaacgcaaggtacgcggcagcgctcccatggtagacgccgcatatctgccgaccacctgcaaccactgtgacgatgcaccgtgcgtcagggcgggcgggggcaaggcagtcgtcaagcgtgaagatggcattgtcatcgtcgacccagttcatgcgaagggtcggcgcgatttggtcgcagcctgcccctatgatgccatctggtggaacgaagaactggaactaccgcagatctggagtttcgacgcacatctgctcgatgctggctggacccagccgcgctgtgttcaatcctgcccgacgcaggcgatgcagtccctcaaagccaatccggaagagattgctgagaccgctcgggtggatcggcttcaggtattgcaacctgagttgggcacccggccgcgggttctctacaagaatctccatcgctttacggctgccttcgtaggcggcaaggcggtggttgaagaagctggcatccgcgaatgtgtctccggggcgagcgcactgctcaagaaaaacggcaaggaattggcgcgtaccgagactgacgtgttcggagaattcaaattcgacggcctggtttgcgacagcggcgtttacacggtcgaactagcgcacgcacgctacggccgcgcaagggtcgaggcttgcctcggggacagcagatacctcggggctatcgaactgctgcctattacccatcgagtaacgggggccgaaggccagccccagcgacaacttagctgatccggacacggacgcattccaacatccaccgggcaaccggaactgaagaggagggataaagaatgaaggtggcatttatcgggctgggtaacatgggctcaggaattgcgggtcgtattctccaggagggttacgaccttatcgtttggaaccgcacagccgccaaggcagaacccctggtcgctgcgggagcgaagctggcgcccaccacatccgcagccgttgccgacgccgacgtggtcctaacgagcctcatggacgaccgctccgtactggataatctacagggcgaacacgggtttctcgcggcgatgaagcccggagcgattcacgtctgcttgaccaccatttcgccagattgcgctgacgagttgggaaagattcacgcggcgcacggcacgcgctttatttccggtccggttgccgggcgccccgacagcgctgcggccggccagctgattaccttcctggcgggagacgcatcggcggttgacgaggtaacgggtttgtgcggtgcctatgcacgcaaggtgattccaatgccgggtcggcccggcatcgctaattcgatgaagctctgcgtcaattacacggcagtttccatcatcgagctgatgggcgaaatctacgccttcggtgagaagtgcgggatcgaccccgaggtgattcgtgagtttttcttcgacgcgtttgcacatccggcccttcgtacctatgcgacgaagctcaaggataacacgctgtcgggtgccggcggattcaatatgaaagccggactcaaggacgtgcgcctgatgctagcggctgcagccggaactggcgtcaacttcgaaatcgccaaagtggtcgagcgaaagatgctcaaggccatcgatgccggcatggaagaggccgactggagcgcagtgtcggccatcacgcgccgggaatccgggctggtctaggccgtgcgatgaccgacgtcctgaccaccttcggctttgcgtggatgatcgtgtccgccgcactcggccttgtcctcggcgccggcaacgagaagcacggcggtgacctcgaggccctggcgcggggtggtcgcctgcacgaataccaccagttgcaaagcgcctatcgccaccgcgtcacggttcatgctcatggcttcctgttttcactggtctgcatcggcgtttcgctggccatgccgaaaatgagttacggccccacggcaagcagcatcctcgcctgggggctgatctcagccaccgtcatatggaccggcgccggattcgcacgcattcgcgcattgatgggcctcgccgatttcgttttcctgatttccctcattgcgaccgtcgtcggactggcgcgatccctcgcctagcctctccggtcccctacaggaaagttgttcatgtcactacaaaattttgtccctacgccggaattcgagaattacagagaagcgttcaaggactgctatcggctcacgcggagggctgacggggtgatcctggccgaagcccatacgaagggagggccggtccagctcagcgtcgaaaatcaccgttcgatcggccaattgttcaaggtgatcggcgccgaccccaagaacgaggtcatgattttcaccggcaccggaacgaatttcatgatgaatgtcgatcccgacggcttcaagcacgagcatgaggatctccagcactgggcttacgagtacgcctataaggacggacgcagcaatgtcagtgcgctggtcaatgatctcgagatcccgaccatcggcgtccttaacggcccgggcttccataccgagctctgcctcatgtgcgatctgaccatctgcagtgaagatgccgtgatcttcgacctgcacttcccgctcggggccgttccgggcgatggcatccatacctgcttccaggagctgctgggcgtcaagcggtcggcatacgcgctgctcaccggccaggccatcgacgcgaaaaaggcattggagctcgggatggtcaatgaagtggtgccgcgcgagcgtctgctcgagcgcgcatgggaactggccgacgaaatcatgaagcagtcgcgcaccacccgcagattgacgacccagatcatccggcgaccgtggaaaaaggcggtcctggacaacgtcgatggcggattcggcatccagatgttctctcatctggcgcagaaagaagcgattcacaacgacaaggcggcagccgcagttctggaccgcatacccggtaatcgcaaggaagggctgcgcttctagcagcctggagagggggagaggggcgcttggccgccgaccgccagaatagaggacacgcaatgccgatcaagctcaattgcaagaattatatcgacggggaatggtgcgctgccgaccgtggctcgacatttccggttcataacccggccgatctgcgcgagcaatgccatgcctatccgctcagcagcgcagctcaggtggaaagggcgatagagggcgcggcccgggcgttcgaacattggcgcaagtcgcctcttgccgagcgctgccgcatcctgcggcgggcggtggcgctgatgcgcgagcggcgtgaagatatcgccgccgtcatcaccatggaaaacggaaagctgcttgcggagtcgctgaccgaaatcgatgccgccgccctcgagctggagttccagatcggcgaaggtgagcgtcagctcggccgggccggcgactgctatcgcgacggcctcatggcctactcgcgcaaggagccgatcggtgtggtgtcggtgatcgtgccgtggaatttccccttcaatgttccctggcgcaagattggcccggcgctgatggcgggcaataccgtggttttcaaacccgccagtcagactccgggcgtcggcgaagtagtcatgcagcttctcgtcgaagcgggcattccccccggcgtggtgcaattcgtcaccggctccggcggcgagctatcggacgtcctgattggtcatcgactcgttcgtgccgtcaccttcaccggctcgaccgaggtcggccgccgcatcgccgcgctggcggcgaggaatttcacccgcacccagctcgaaatgggcgggaagaatccgatggtggtgctggccgatgccgatctcgaactcgccagccaggatgcggtcatcggcgctttttcgtgcgccgggcagtggtgcaccgcgaccagccggctgatcgtcgaggatgcagttgccgaccgactggtcgaatcgatcctcgatcgcatcggccgaatccaggtaggcgccggcacgcggccggaaagcacgatgggtcctgtcgccggcagccaccagctcgaatcggtcctgtcgcacatcgcgcgcgcgcgcgagcagggggcgcgtttcctggcgggcggcggacggtgcatggaatccgatctggttcacggctgctttgtcgctccttcgctcatcgatcacgccagcgaaatgctcgatgcggcgcgtgaggagattttcgggcccgttctttcggtattccgggtcgccgactacgccgaggcgttgcgcctcgccaatgccgtgccttacggcctgtcatcgtcggtgtacacgcgggacctcgaaaaggcgctgcatttcgtcgagcacaccgaggtcggtctgactcacgtcaacgtgcattccgcctacaaggagccgcaacaatgtttcggtggagtcaaggaatcgggctttggcctgcccgaggctggcggcaccggcattcagttcttccaggatgagaagtccatctacatccggaaaggccggccgatgggccgcgcctgaccccgccacgcgcagaggataagcatgccactcactcaacagcaaaaaatcaagctctataccgatctggttcgtgccaccacgctggaccggatgatgatgcgcatcatccgggcgggcaagatggttggtttttaccatgagggcggcatcgccctggctccgggcgtggcggccggcgccttcctccgccgcgacgacgccatgaatccgcattaccgtgcccatggcatcgcccacatgattgccaaggggatagacatcaagacctacatcgcggagcacatgggccgggtggatggttgctgcgggggacgatccagttaccacgtctcatatccggcagatcacattttcggctggtcgggcaatatcggcgccaatttcccgccctgcatcggttacggcctcgccgcccgctaccgcggcacggatcaggtcgtgatgaactgctcgggcgacgggtcctaccaggagggccgggctcacgaggccatgctgatgtgcgccaactggaagctgccggtgatcttctggtgtgagaacaacggcatttcccagcacagcctgctcaaagacctgtttccggtgtccgatttgtcccgtttggctgccggctatgaaattccttctgccatcgtcgatggtcaggatattttcgcttgcggcgaagcggccttgcaggcgatcgctcatgcccgcgccggcaaagggccgtttttcgtcgaattgaagaccctgcgcgtccaggagcacaacgtcggcggactcaaccacgatggcgccgtgccgcgcgatcccaaactgatgcaggagtggcgcgagacccgcgacccgctgaagctggccgccgtgcgcctgcttgacgagcaggtgctggcccaggccgatctcgaccacattcaggccgacgccgaccgtgaggcagacgaaatcgagctctggtgcgaacagagcccgaaggcgacgccgcctgtatccgaactgcttgccggcgtttacgccgcctaatttcagggaatcccatgactacgatgacgacagcgacgcgggaaatcggtatcggtgaggccatgcacgaggcgctcgccgaggagatgcggcgcgacgaagatgtattcaccctgggcatcagtatccgcgccgggacctttccccataccaaggggctgtacgccgaattcggcgaacgccgtgttctcgacaccccgctgtccgagaccggatgcttcggcgcggcctacggcgccgcccaggaagggctgcggccggtgctcgacttcatgtacgccggcttcgcctatttcgctggctccgaggtcttcctgcaaagcggccagtaccacttcctgcacggcagccagcaccccctgccgctcacgatgatcggcacctgcggtgtcggccgccgggtcggcaacgagcatgcgacgctaccgtacggtgccctgattcaccatccgggcatcaaggtctgcatgccctctacgccctacgacgccaagggcctgctcaaggccgccatccgcgataacaacccggtctttttcctgtggcacacgagcatgatgggggtcaaggggcatgttccaaccgaggactacgtcgtgccattgggtgtcgccgacgtcaaacggaaaggcagcgacgtcaccgtactcgcaagcggcctgcaggtgcataacgcgctcaaggtggccgagaaactggccggcgaaatcagcgtcgaggtggtcgatgcccgcagtttcgaacctttcgacctgccctgcctgctggcctcggtcgagaagacgacgcggctggtgatcgtcgacgaggactacgagcgcggtggattcgcagccgaagtatcggcgcagatgatggaccatggctatgacttgctggatgcgccagtgaagcgcgtctgccatccgcacatgccggtgccgggcggatacatcgatgtgtacacgatgcccacgccggaacggatcgaagccgctgtgcgcgacgtctgccgataagggggagccatgattcgggatctggtgttgccccagttgtccatggggatgtcggagggaaccatcgctgaatgggtggtggaagagggtggctttgtcgacaaggacgacttgctggtcctcgtcgagaccgaaaaggtagtcagcgacctgccttcggcttaccggggatacgtccatatctgtgttcaaaaaggcgaaacggtgccggtcgaagtcttgatcgcccagattgccgaaaccgaagaggaataccagcagctcacggccggaacgacggaggccaggatggcggccgcgctggtaacggccgcgacgaaagaaaccgccgttgaactcgccccgactgcaacggcaggcgggcgtcgccaggcggtgtccggactggcgcggaaggtcgccgaggtgcgcgggttggatcttgccggcattaccggcagtggtccgggcgggcgcatcgttcgccgcgacgtcatggccgcgctcggtagttccgcggtggctatgccgcgcattccggccacgatgactgccccgctccccctcgaggaaaaagggatgcgtgcacttgcccgcatcccgatggtgggcatgcgcaaggcggtggccgaacgcatgatccagtcgaagaccaccgccgcccacacctacgtctttttcgaagtcgatgtcaccaagttgttggcggctcgcgaaaccatgctggcgcgggagaaggaactcaacgcgcgcatctccatgactgcgctgtatgtcaaagcgctcgccatcgcatgccagcatgtgccgatctgtaacgccacccttgtcgatggccagattaccgtctggggcaatgtcaacgtcggcatcgcagtggccttgccgggcaagaccgactacgagtccggcctgatcgtcccggtggtgcgtaatgcggaagccaagagcgtgcttgcgctcgaccgcgaaatcaaggatctcgtcgaacgcgccaagaccggaaagctcgctcccggtgatacggcggacggcacggtcaccctgtcgagcgcagcaggtttcatgccggggcagtggtgcgtatcgaccccgctcatcaatcagccacaggtcttcaattttcagcccggttcgccgattgaaaagcccgtggtcgtcgacggccagatcgtagtacggacgatgctgccctgcggcctgagtttcgatcaccgcgccatggacggtgatccggtggcacggttcaaccgcaagatcgctgatctcctggccaaccccgaactcatgctgctgtagggcaaatgatgaacccgaaaaaaccctacgatgtcgcgatcatcggagccggcccgggcggctatgtcgcggccatccgcgccgcgcagcgcggcctggccgtctgcctgatcgagaaatccgagcctggcggcgtttgcctcaactggggatgcattccctccaagagcctgatccattacgcgagcgcttaccacgctttgtcggacatcgagatggtcggggtcgtggtcgaccgttccggcttcaactacgccgcggtgcaggccaggtcgcgggaagcggcgcggattctggccggaggcgtggccggactgctcaggaagaacaaggtcgaattgctgaaggcgacggcgcgcctcgccggtccgggcgagatcgtattgagcggcggtgagcatgacggcaaggtcattccggccaggaacatcatcgtcgccacgggttcgcgccccatggccgtccccggtttcgaattcgacgaacgcgaggtgctttcttcctcaggtctcctcgcgctgaccgaattgcccgagtccctggtcatcctgggagccggcgccatcggctgcgaattcgcctatgtaatgaatgctttcagggtcaaggtcaccctggtcgaaatggcgccgcaactcctgccgagcgaggaccaggaagccgcccgggtggtcgaggaaggctttcgccgcgcgggcatcgacatccgcctcggctggcgcgccgccgcgctgaaacgcgaggaaggcgcggtcgaggtggcgctggcaggtgagggcggggcgaaggaaaacctggtcgcggcaaaggtgctgaccgccttcggccgcgtccccaataccggcggcatcggcctggaaggggccggcgtccggctcgacgagcgcggctacgtcatcaccggcgatttctgctcgaccagcgtcgcgggcatctacgccatcggcgacatcacccgcacgccgctgctggctcacgtagcttccaaggaagcggaaatcgtggtggaccatattgccggggtggcctcgtccgagcgacacgtcgatccggacctcgttccgtcggcggtctattgcgaaccgcaattggccggattcggcctgcgcgagcaacaggcccaggcgcgcggcatccgctacaagaaatcggtcttcccgtatcgcggcgctggcaagagcgtcgccatcgggcgcaccgagggactggtcaagatcctcgccgatcccgaaaccggcgaagtgctcggggcccacgtggtgggcgccgacgcgaccgaactgatccacgagcttctgctcgccaaacatggcgaactgctcgcagacgacgtgcagtccatgatccacgcccatccgaccctgtccgaagcggtcatggaagcggcacggggtatcggtggccagcccatccacatctgacggaacggaaaacatgcctgagcaagcggtggaattgcccgcgcctcgacatcctcatctaggtgcggtgcagttgccggcggaccggcagccgcagctgcgtgtgatgccgatgccgagcgacttgaatcccaatggcgaggtcttcggcggctgggtcatgtcccacgtcgacctcgctggcgctctggccgcgagagcgcgtgcgggcgggccggtcgccaccgttgcggtcaattcattcgttttcaggcaacccatctcggtcggcgacgtcgtcagtttttatgctgacatcgtcaaggtggggcggacctcgatcacgctctcggtcgaggtgtacgcccagcgcgagacaagccatccagtcacggtcaaggtgaccgaagcgctgcttacgtacgtcgcgagagatcgtgccgggcagaagcgtgaaattccgccgcagtagctgcgccgtatctccctcaaacacaggaccaatcatgaacaagctcataattcgcaaggccgcggtgttgggtgccggcgtcatgggagcccagatcgccgcgcatctggtcaattgcggaatcccagtcgttctctacgaccttccggccagggagggcgacgccaacggcgtcgtcctgaaggccatcgccgaactgcagaagctccaaccccagcctctgacccggcgtgagctggcagcctggatcgagcccgccaattacgacgcgcacctgtcgcgcctggccgagtgcgacctgatcatcgaggccatcgccgagcgtatggatctgaaacgcgagctctatgcgcgcatcgccccgtatctgcgcccggacgtcgtcattgcgaccaatacctcgggactgtcgatcaatgcgatgtcggcagagctgccgccggaattgcggacgcgcttttgcggcgtgcattttttcaacccgccgcgctacatgcgactggtcgagatcattcccgcaaccgcgaccgatcccgacctagtcgatgcgctcgaggcctttctgatctgcggactgggcaaaggcgtcgtgcgggctttcgacagccccaatttcgttgccaaccgcatcggtactttcgccatggttgccgccatgcagcataccgagcgcttcggcctgggcttcgacgaagtggatgcgttgaccggtccgctgatcggcagaccgaaaagcgcgacctaccgtctgatggacgtaatcggactcgacacgctgggcggggtcttgcgtcgattgccggaggcgctatccgaagatccttggcgagggcacctgaacgtgccggcgtggcttgacctgctaatcgagaaaggcgccttcggccagaagagcggtggcggaatctatcgcaaagagggcaaggacattcacgtgctcgacggcatgagcggcagctaccggccagccggcggtaccgtccaccccgaagtcgaggccatcctaaagctagctgacaaggccgagcaattccgccggctgcgggccagcgcccttccacaggcacgcttcctttgggccattcagcgcgacctattccattattgtgccgtgcatctgggagggatcgccgccagtgcgcgcgaaatcgatctcgcgatgcgctggggctacggctggcaacaggggcctttcgaaatttggcagtcgaccggctggaccgaagttgcgaaaggcattgcggaagatatcgcggcgggcgataccttggcggcgacgccattgcccgactgggtcttcgacgggcgtgacggcgtccacgacggagccggctccttttcggccgctgcggggcaatcggtgccgcgaagccggctggcggtctatgatcgccagatctttcccgagcgattgctgggcgaagccgaaaagccggctggaacgaccgtctttgaatccccttcggttcgcctttggcacctggatggttgcccggacgtcgccatccttaccctcggcagcaaaggcgggacgctcgggccccaggtcgtcgaagacctgcgcgcatcgatccgtctggccgaaagcgatttttgtgggctggtgctttggcggccggatgggcccttctcgctcggcgccgatctcaaggcgctgaagcccgtcgccgatgccgccgactgggctgcgatcgatgccatggtggggagtttccaggacgtcacccgggcgatcaagtacgcccagatcccggtcgtggccgcggtgcggggaatggctttgggcggcggctgcgaactcgccatgcatgccgctcgggtggtcgcggccctcgaagtccagcccggcctcgtcgaagcgggggtcgggctgattccggccggcggcggctgcaaggaactggcgctgcgggcgtcccggcaggccgagcgcacggtgcaaaacgaacccttgccttttctccacaaggtcttcgacaccgtcttccgcggaacgatggccaaaagtgcgctggatgcaaaggcaaacggcttgctggcggacgaggacgtggtggtcgtcaatgccgacgagttgctgcacgtcgccctggtcgaggcccgggcgcttgccgcgtccggctggcggccgcccctcccggcccgtgatatccaggtcgcgggacgaggcggcatcgccacgctggaaatgacgctcgtcaatatgcgcgagggcggaatgatttcgccccacgattaccgggttggccgagctttggcgaccgcgctctgcggcggcgacatcgagggcgggacgcgtgtggacgaggaatggctcctcgctgtcgaacgccgcgaattcctcgaattgatcaagacggaagcgacccggcagcgtgtcgcgcatacgctcgaaacgggcaagccattgcgtaactaaggataagtcatgcaaaaacagattcaggacgcctatctcgtcgctgcggtgcgtacgcccgtttccaagcgtcgcggcatgtttaggtacgtgaggccggacgacatgctggcgcatgccattcgcaacgtcgtggcccaggtgccagggctcgatccggcagaaattcgcgaggtcatcaccggttgcgccaatccggaagctgagcagggtttcaacgtgtcgcgggtcggggccctgctcgccgggctgccgaacagcgttcccgcctataccgtgaaccgcttctgttcttcgggcctgcaagcggtggccttggctgccgaccgcatcaggctgggggaagccgatgtggtactgggctgcggcaccgaatccatgtccatcatgccgaccatgaccggtaacaagacggtgttcaatccggcgattttcggcagcgacgaaaatatttcgattgcctacgggatgggactgaccgccgaaagggtcgcgacacgttggcaggtgacacgcgaagcccaggatgccttcgctgtcgaatcgcatcgccgggccattgcggcgatcgaggcgggtaagttccgcgaagaaatcgcgccctacacggtgtgggatcatctgcccggcgcaaagggtgaagtacaggtgcgcgagcgggtctgcgacaccgatgagggaccgcgccctggaaccaccctggagggtctggtgaagctgcgtcccgtgttctccgcgaagggcagcgtgaccgcgggcaactcctcccagatgtcggacggcgccggcgcggtcctgctcatgagcgaggccgccctgaaacgttacaacgtgcagccggtcgcccggttcgtttccttcgcggtggttggcgtgccgccggaagtcatgggaataggcccgatcgaagccattccgctggctctgaaactgggtggggtgaagcaggcggacatcgactggatcgagttgaacgaggcgttcgcttcgcaatcgatcgcggtgatcaacagcctggggctcgatccggagcgtgtaaatccgcttggtggtgccattgcccttggccatccgctgggtgctacgggcgctatcagggttgcgaccatcatgagtgccatgcggcgtggagaggccaagtacggcatggtgacgatgtgcgtggggaccggaatgggtgccgccgggatttttgagcgggtataggaagatgaagccgatcgaaattggggcaacggccacgcggcacgtcacggtcgactctggtcgaaccgtcgatttcctagggaagaacctccgtgtctatgccacgccagaattggtgcgcgacgtggaggcggcctgccgtgacttcttgctgggttatgccgacccgggcgaggactcagtggggaccggcatcagtctttcgcataccggtgccaccctcctcggtatgaatgtgaaaatcaccgcgaccgtggcggcggtagacggccgcagggtgaatttctttattgtcgtgtgcgacgacgccgaggagatcagccgtggagagcacagccggttcgtactggaggtggaatggctgtatggcaagctcggcgcaaaagggaggctggcgaagcctgagtgcgaggcaggttgaaccgttgcttgacttcggttttcccggaaatcccatctcctccttcaccccttggatttccggtttttgcggctcggtgagcgttgctttccgagccgttttttatccttgtgcccgagattctgttgctgtcgaggtgtcgctcaggaacccccacggcccctctaacgctggaaccgagccgcccgctgggaaggcgtgttcggagtactctggcgcaatggaatggaccgcgaacaagcccctcttgtcatttttacagcgcttcctgctcgattttcctgcgcgctgagcgcaactccggcaattttgttttcatgatctctgcgatcttggaaggagcgactccgaggccctgtagaacgacgatggctacgctctgtccgtacttttttggtgcctttccggagatgaggcgtcgcatcgcgctggtgccgacgccttcgaacaggtcgagggcgatctcgacacttggaacgctcacttcctttgacttgatggccctcttcaagtcccgaatcggtgcttccagcgctatcgttccggcaagacgaacgctagcgacgaaggcgcaccaggtcttgtccgcctcggcccgggacatgtacagccggatccccaacccaatccgggtcaccggatcctcgaccttggcgagcacttcctcgatggactgcatcaactcgtcgcgcaacgaggtcttggtggcatcgaggagttcctcggtactacggaagtaattatagaaagtgccacgagctattccggcggcggtgatgaaatcatcgatgactgctgcctgcggccctttctcggcgaacacgtgcagcgcggcttcgatgatcctggcctcggtcttggcgcggcgtcgtcgcccgacgatggtgcggtgattctcggccggcggcatggcgccggttgatgtagtcaagttggcctcggtgccgagcacgcagttcaaggaggccatccgtccgatcagccaggtgtccgggcagattcagttgtcgcctgacgtctcgcttagcgcgtattaccaattccgctgggaggccaatcggctcccggccgcaggcagctacttttccggcgtcgatacggcgccgacgggtggtgaacgtctcttgctgggacttccggttccgccctttgccgcgtccgatgcgctggaactggacgatgaggatgccaaggatgcggggcagggggggctgcaactgcgagtgcgggctggcgagaccgatcttggtttctacgtcgtccggttccacaacaaggccccccagcaggtcgtcaacctcggcttgatggggccggtggtgacgccgatttcgtatcggctgaactatcacgagcgcatcaccgcgttcggggcgagcctcagtcggactttcggcgacgtcaacatcgcgggggaggcttccatccgccgcgatcaggacctcgccagcagtcagtcgttcgataccagcgcgctcggggggccggcgaccaacaaccgtggaaaccccgcctacgcggtgggcaggaccgctcacgtgaacctgtctgccttgtggtccttgccgcccagtgacctgtttcccgaggccaatttcatcggcgagatcgcctggaaccgggttctgaaagtgaccaagaacaagtcggcgctggacccgaatgcgacgcgcgatgcggttgcgctacgcatgaccttcgagccgatgtatcggcaagtgatgcccggttgggatatcagcgttccggtggggctcggttatgcgcccaagggctcgcgttcgatggcactgggacccggggtcatgccggccaatggcggcggggatatttcgttcggcatcaacggcatctatctcgaccagtggcgcctcggcctcaactacacccattactacggcgccgccgatcagttcctgacggatgcgaacacctttagctacaagcagtacctaaaggatcgcgacttcgtcacgttctcggtgaatcgcaccttctgaggagacagagacatgacaatcaaggtacgtatcgcgcttgcatcggcggtggccgcgctggggctggcgatcgggatgcccgtcgcacaaggtgccgaccccgtgaagctcgggaccacgctgacgccgttcggagcggaacgggcgggcaacaaggagggcaccatccccgcctgggagggcggttacgtcaacccgaaggatggcctcaatgccgctggccggcggatcgaccctttcgctgcggacaagccgctctactcgatcaccgccaagaacatggcgcaacacgagggcaaactgtcggaaggcatcaaggcgatgctgcagaagtatcccgacttccggctcgacgtctatccgacccgccgcactgccgccgccccgcaatgggtctatgacaataccgcgcgcaattccttcctaggcaagttgatcgacgggggggcggggccgcagcccgccaatgtatacggcggtattccctttccgattccatcgtccggaatcgaagccatctggaaccacgaactgcgctggcgtccgccttccatccagctggaccgcttccgcggttacatggtgacggcggaaggacgtcccgttcacgtgctggaatcaaacaacgaggagcagaccgcgtactacctcaaggatggcgagaagcagttcaatggcgagtactggctggtccgctcattcaactccgggccgccgatccgggccggcgaagggattgccggacggttgaatctggacgaaagcaagagcaatacgtgggtgtatctcaccggccagcgccgtgtccgcaaactgccgaattcctgctgcgatacgccgacgcctttctcggcgggggtcgtgagcttcgacgaagtcacagtgtttacccttcgcaaggaccgcttcaactggaagctggtcggcaagcaggagatgtatatcccgtacaacagcaatcgcaccctcgtcccggccaaggattcggacgtcgtcggcacccatttcgtaaaccccgaccatgtgcgttgggagctgcaccgggtgtgggtggtggaggcgacgctgaaggagggcgagcgtcacacttcgccgaagagccgctactacctggatgaagacacctggtcggcggtgctcgccgaccgttgggatgccaacggcacgctctggcgggtgcccttcatgctgccgattgtgatgcctgaggtgccagccgtgatgggtctggtgtggggcgtgtatgacctcaactccggttccatgttcgtcaatcgccttatgaacgaaagcccgacccaggttcgggtgacggagccattccgcgattcgatcttcacgccggatggcatggtgggcgaaggggtccgctgatcagtacgcaatgcggggtggggccgctctgaccagaaggcgcgacacgccgggcagcagggcggttccttcccgcagtggcctggcattgcgacgggttgtctgtttcccgaatcctggggatttcgatgtttgcatattcaaggacccgggcagcgggttggttgggctgtctgatggtcggcctgacatacgcaggtgccggccatgcggcaggggccgtggtcccgccgctcgagcggccggcgacgatgctggtgggagcgcgcgccgagcaagtggcttttcaggcgctggcggtggcggatcggcagattttcgccgtaggtgagcacggcattgcgctgcgttcggacgatgccggcaagacgtggcggcaggggcaggttcccgtttcggtgacgctgactgcggtgtccatgctgacgccccagctgggatgggcagtcgggcatgggggcgtggtcttgcgcaccgaggacggggggcgaagctggtcgcgccaattcgacggtttcgccgccatccgcctgctgcaggagacggtgaccgccgaggtggatgcggcgcttcacgagcagcgcacggccctcgcccagcgtctggccgaagagggggcagacaagccgctcttcgccgttcacgcactcgacggccagaccgtgatcgtcgtcggtgctttcaacacggccttcgttagtcgcgatggcggggcgcactgggcgtcgctcgccgagcaactgcccaacccacgcgaagggcatctctatgccgttgccggtcgcggacaacgcctgtacatcgccggtgaattcggtctgctgctggaatcgcaggatgccggccacagtgtcgagcgcctcgccgtgccctacgcggggagtctgttcgcattggcatacgacggccggcgtctcgtcgtggggggcctgcgcggcaatgccttcgtgtcggaagacggtgggcgcaactggcagccggtaacagggctcggtgaagcttccatcaccgcgatccggaccgagccggatggcagcttcctcatcggcgaccaggcgggcgcgctgtggcgcctttctggcgaggcaacgaaggccgagcgcctgccgacgccggtactgcccccgataaccgacctggcaccgacacacgacggggcggtcgtcgtcggcagtgtggcgggcgtgatccggctcgacggcccgactaaagagagggcgaaatgatgcactccatcgacgcaccgctcgtggcggacagcaggaccggcttcgaccgccagtccggctctttcgtcgaacgcttactgttcaacaaccgcctgatcgtcatcgtcttctgcgccttgcttaccgcagtcttgggctggcaggcgacccggctgcagttcaatgccagctacgagaaaacgataccggcgcatcacccgtacgtcctcaattatcagaagcacgccgcggatctgaaaggcctggggaacgcgatccgcattggcgtcgaaaacgtggatggttcgatctacgatccggcctatctggcggcgctgcgcaagatcagcgatgagtttttcctcgtcccgggggtcgagcgtcagcacatgaagtcgctgtggacaccgaacacccgctggttgggcgtcacagaagaggggctggaaggcggcccggtgatttctggcggatacgacggctccgcagcaagccttgtgcagttgcgcgccaatgtggcccgttccggcgagatcggccagatcgtggcgagggacgaaggttccaccgtaatctacgtgccgctcctgagcacgatgccggatggccgtctgttcgattacgccgaatttgccgaacgcgtggagcagatgcgggttgagcatgaatcagcgcagatcaagctgcatatcaccggctttgcaaaaatcgtcggcgatctgatcgacggactccagcaaattctcggtttcttcgcggccgccattgcgattgcgaccgcgatcgtcttctggtatacgcgctgcgtgcgcagcaccctgctggtggtcgcgagttcgttgattgcggtggtctggcaacttggattgcttcccgcgctgggcttcgtacttgatccgtattcgatcctcgtgcccttcctcgttttcgcgatcgggatgagtcatggtgcgcagaagatgaacggcatcatgcaggatgttggtcgcggcatgcacaagtatgtcgcagcgcgcttcacgttccgccgcctgttccttgccggtctgactgcgttgctggccgatgcggtggggttcgcggtcctgctcgccatcgacatccaggtgatcagggaactggcgatcgcggcctcgctcggtgtcggcgtgctgatcttcaccaacttgattctcctgcccattctgctttcctacacgggcgtgtcgcagcgcgcggcggtgcgcagcctgaatgccgagcgagcggaaaaaagcgggcagcggcaggcgttgtggcgttttctggatcgtttcacctgtcgtccctgggcgaccgttgcgatcggcgtcgcgttcgtgctggcgatcggaggcggtattgcgagccagtcgctcaagatcggtgaccttgatcccggggcgcccgagttgcagcccgacagccgctacaaccgtgacgtcgcgttcatgaatgccgcctacggggcgagcagcgacgtgttcgccgtgatggtggagacgccggacggtgcctgcacctcttacgacacgttaatgcggctcgacgcactggaatggtcgctgcgccagttgcccggcgtggagtccaccaacagcatggcacagctttcccgtcgtgtcggggtgggtatgagcgagggcaaccccaaatgggatgacctagtggcgaaccaggagatgctcaacactgcggcaagctatgcaccgcgcggcctctacaacgatagctgcagcctgctcacgctttatctgtatctggccgaccacaaggccgacacgctgtcggcagtggcccgtcatgtcgaagccttcgctgcggacaacgacagcgacgagtcacgtttcgtgctcgccgccggcagcgccgggatcgaggcggcgaccaatgcggtggtgcgggatgcctggcgaaccatgctgttcatggtgtacggcgcggtcgtgctgctttgtttcatcaccttccgctcgtggcgagcggtggtggtggcggtgctgccgctgatgctgacctcggtgctggccgaggccttgatggtcgcgctgggcatgggcgtgaaggtagcgacgcttcccgtgattgcgctgggggtgggcatcggggtggactatgcgctctatattctcagcgttacgctgaccagtctgcgcgccggtaacagcttgtcggaagcttattacagggcgctgctatttaccggcaaggtggtgatgctgaccggggtgaccctggccgttggcgtctttacctgggcgtggtcgcccatcaagttccaggcggatatgggtatcctgctgaccttcatgttcctgtggaacatgctcggtgcgttgatcctgatccctgcactggcgagcttcctgctgccgcagaaatacacgtcgatccaactggttgccggtgcggccgaggtgtccgcgacgacggtgggcgcaagccagttgcgtcggcccgcagcctagagcacctaggagggagtgatgtaccgccatattctggtaccggtcgacgattcgatcttttcggcccataccgtcagtcgcgccgttgaattcgcgcgcaccgtcggagcccgtatcaccttcttccacgctgtggcggactatgccagctctggcgaaggtgcgctgacgcacgttatcgagccagcggttttcagggcgcacatggtggggcgggcgaaggctgttctgcataaagcgctacttgccgccgatatcgggaagataccgtcggaagcgagccatgcggtgagcaatcggccgtacgaggccatcctgcaggaagtcagggcccgggggtgcgatcttgtcttcatggcatcgcatggtcagcagggcttgagccgcctgatggtcggttcgcagacactcaaggtgctgagtcaagccagtgtgccggtgctggtcgatacgagcgagagtcgtgtgagccggccggcaatgactaggaccttgggcatcatcctggatgggcatcgcacctgcggtgtcctgctgcgacagttacaggctttactgcgggagatttctgctggccgggttgttccggatttctccttgatgcagatactcgtcacctgcctggatgagttttcccggcgccgacatcaaccgaaagaggaagcctacctattcgcgttgttgaggcagcgtagccctgaagccgaggtgctgctttcggaactcgagttgcaataccaagaggagccgcgtcgcttggctcgtctggctgctgcgctggatgcctgggaggcagatccgatgaatggtttcaaggcctttatttgcgagagtgacgattacattgatttcgtctggaaatacattgtgttcgaagagcgggaggtgtttccccttgcgatggcgaaactgacggaaatcgactgggcgaaaattgccaaagccttcggtgaaaacggcaatcagaaattcggtatcgcgcaggacaaactgttccgcgagggggtctggcggctgctatccgatatgcccatcacggaatgacccgccctatcggcgtacgccggtaccgcagcagtacgataacgagcgccgccaagggcgacaggagacaagagacatgaacaccaccgagaccctgcgaggccgggtcacactttgtatcgcccatgtagcaggcatgatcgacatggtggcgctgccggtatgggttggtaccctcatcgcccactatcaatttaccccgcagcagtctggagggttggcatccttgttccttgcgggggtggtcacggccagcctcatttgcgcaccgcgcttcagatgtttcccggggcgcctggtcgtaccggccggatttggtctcgcggctctcgcgttcttccttgccacgctatccggggagtacgcgatcctggcagtggctcacgcgttcgggggtatcgctacgggcgtcagtctgtccttcacgcacggtacaatggggcggagccgcaacccccaccgtatgttcgccgcggctcaattctcgcttggtgtattctccatcgcatttttcggcgcaatgccgctgctggtcgagcgatggggagggcaggcgttgttcatggtctttggcgctgtcatgacggcggctgccatcgcaaccgcgctgttctttccgcggccggccatgcagttttccgagcagccggcacacacccgaacacatggccggatacccgtcggcgtctgggccggcatggttggtgtgagcttgatggcgaccatacaggccatggcattcagttttgtcgagcgggtgggcgtggaccgtggtttcagtgtcgagcaggttgcgtccgtcctggtggcggtgggcctggtgacgctgtttccggcggtgctggcggctgtgctgcagcaccgctggtctgcccgccgcgtgatgatgggagggccggtcgttcaggcggcactggcattgatcattttcaacgcagccacgttttttccttacgcggtggcgacaagcgttttcaccttcgtgatgatctttacccatacttttgccttcggctatttagctcaagccgacctaaccggcagggcggtggcggcgacgccggcgatgaacatgattggctcgggtatcggacccttcatcggcggcaccctggtgcagcaatttggttatcccgcactcggtcatactgcagtagcgctggcctgcctggcggcgctcgctttcgcacttacgacattgcgctcggataatgacgcgcaccaggcagccatcattcaggactgagagacaggcattacacatcccatgctggatcgctactcaatcgggaccaagcgtacgtccgccgcacccacggcgggacaaatcaagatagtagtcggtgtgccaagaagacgaagcagcttcggctgcgtagtcatgctgtatccatgatgaggacgggcccctcggtgttgaaatcgacccttttccgtggacacctgaaccttacagatcaaggagtccccgatgcccaaatcccgctcgccgtacccggctgagtttcgccagcagatcatcgaattggcgtaggccggcagaagtcccgccgagctcgcgcgcgagttcagtccgactgcgcagaccatcatcaactggctcgcccaggctgcctgggatgtgggcaagcccttgcccggcaaggaaggactcacgagcgccgagcgtgacgagcttgcccggctacgccgagagaaccggcagttcaagatggagcgccacatcaagcacatgcgcaccgaactcgtgctcggggcactcaacatggccatttccacccgcaagcccaccgaggtcatccatcacagcaaccaaggcagccagtacgccgcgctcgcgttcggcaaacgctgccagcatatgggcgtgcgcccgtcgatgggcactgtgggcgatgcctacgacaacgcgatggccgaaaacttcttcgcgagcctcgagtgcgagctgctcgaccggcgcgccttcaagaccaagaccgaagcgcgactggccgtcttcacctggatcgaaggctggtacaacccatgccgaagtcattcggccctcggctatctgttaccgatgaccttcgaggagaaaaaccaaaccctcgctgctgcaccgtag

SEQ ID NO: 93 - DNA, 35892 bp, Unknown
  From metagenomic library of CO183
agactctcggtctcgcgcgcaagaatatgctgtcaacagggcgtgcggttttgcagcggcgggcgagcagtccttggctgcgtgcggtattctcggtctggaatttgccggatctccggcccaaccacttccctctgttctggtgctgtctgccgtgttttctgcccccctcgactgttcccgcattcgcgccatcacgctggatctggacgacacgctctggcccatctggcccaccattgccagggccgaatcggtgctgcaggcctggctggccgaacatgcgcccgccacgcacgccctgtatgcagtgccgggggcgttgcgcgcccttcgcgagcgcatgaaccacctgcgcccggacctggtccacgatctgagtgcgctgcgccgggagtccatccgcctggcactcacgcaggcgggagacagtccggcactggcagagcccgcattcgatgtgttttttgccgagcgccagcgggtcgatctgtttgaagatgccgtgcccgcgctcgaatacctcagcagccgctggccggtggtggccttgtccaatggcaatgccgatgtgcaccgtgtgggtctggggcgctatttccatgctgccgtgagcgctcgcgaagcaggcgctgccaaacccgatgcgcgcattttccacacggctgcgcgcgctgcgggcgtggatgcggcgcaggtcctgcatatcggggacgatgcccacctcgatggcgtcggggcgctgcgggcgggcatgcagacggtgtggctcaaccgtgaggggaccgcctggccgcacgatgaccatgccccccatgccactgtggcaagcctgcacgaactgcaccggttgctcgcctgagcccgttcccacggattcattctctttttttctcaccacctgcccatgcccatccaagctttctttctgccccaggtgcgttccatcgccttcacccggcccctggcctggctggctctgggctggcgcgacatggtgcgcgcaggcgccatcagcgtggtccacggggtgttgctggcggggctcggcatggtgattgccgccgtggcccatgaccgcttctggctgctcgctggtgcgctgtcgggctttctggtggtggcgccggtgctggccaccagcttttatgtgctgagccggtcgctcgagcgcggcgagcccgccaatgccgcagcggtcgtgcgcacctggctgttctggcagagcagccaccgcgactccaagtggggcaatgattactggtgccttgtccagttcggcgcgctgctggcgctggcggccacgggctgggtgctgatttcttccgcgctgatcaccctgctggcgcctgcaccgatacgcacacccgcagatttcatcgtgcatgtggtgctggcgcaggacagcacgctgttcaccctctggctggcgctgggcagcctgctggcggcgcccatcttcgcctccagcgtggtgtccatcccgctgttgctggaccggcaggcctcgctgtggcaggccgtgctcacgagctggcaggcggtgctggccaatccggccaccatggcgatgtggaccgcgatcattctggcgctgacgatgctgggcatggcaaccctgttgatcggcctggccgtggtcatgccgctgctggggcacgccagctggcatgcctaccgcgacctggtcgatgcctccagcctcccgcagcgcgagccgggcggtccggcagcaggggaagacgccacgcaacgcaatggaatggcatcgtgatttttggatacaccgaagcgcagttatcggcctttttcctcacctacggggtcggggccttcattcttttcatggtcttcatcatcgggcacctggcctgggagtccaaggccggccggtttggcacctttgtgctctttctcgggctgggtgtgggcttcctcgggtttttggccaagtacctgatccagtggtggctggagcgctgacggtgtcttcactttcgccttctttctttctccaaggagacattcccccatggggctgacgatctacggcattgccgcatcccgagccgtgcgcccgctgtgggccgccaccgagctggggctggccttcgagcatgtgcacaccccctaccaggggggcgccacccgcacgcccgagtttctggcgctcaaccccaacggccacattcccgtgctggtggaccaccggcctgagggtgatgtggccgtgtgggagagcatggcctgcacgctctacgtggtgcgccagcatggccggggtgacggctccgacatcgccccggccacgccgcgcgaagacgccgaggcattgcgctggagcttctgggccgtcaccgagctggagaaggacgccctgactgtgttgatgcaccgtgtggccatacccaccgacgagcgcaagcccgaactggccgaggccgccgaaaggcgcctgcgcgttcccctgcgggtgctggagcagcacctggtgcagcagcaggcgcacggccaggcgcatgtggcggccgagcgcttcaccgtggccgacctgtgcctggccagcgtgctgggctgggcgcgtccggcgcgtgcgctgatggaggagtttccggtgacgtccgggtggctcgcgcgctgcctggaccggccggcacaccaggcgctgcgggcgctggcgcgcaaacactgaccgcaggctttacctgcacttcacacgccggtcgcggtcctgacagaccggcccggcacaatggtcttcagtgcccttttcgatgagggcgcccgattgtgaatccatgaccatgccttctccttgttcccgcacgcgcccgcctctggccgccgggctgctggccgcgctggtgctgctcacaggctgtgccgccatggcaccgcccggcacgtctgtgcccgacctggccgttccgacggcctgggcgtcagcaccggtgtccacgggtgcacccggcgctgccgccacgcccctgactgcctggtggcagcgttggggtgatgcgcaactgaccgcgctggtcacccaggcgctgcaggcccataccagcgtgcgcagcgcacgggcggcgctgcagcaggcgcgtgcccaggccgatgtgcagggcgcagccctgctgcccggtgtcgatgtgtcgggctcggcccagcgcagccgttccggcggcagcaccggcaacagtttccagctggggttggatgctagctgggagcccgatgtgtttggccgtctgggcgccggcgtcagtgccagcgcggccgatgtgcgcgctgcgcaggccggcctggagcaggcgcaggtggtgctggccgccgaagtggcggtgaactacctcacgctgcgcagcgtgcaggagcgcctggccatcgcgcgccgcaacctggccagccagcgcgagaccctgcagatcaccgactggcgcgtgcaggccggtttgagcacctcgctggtgtccgagcaggcgcgcgccgccgccgagcagacggcggcgcagattccgcaactgcagaccagtctggcgcaagcccgccacgcactggccgtgctggcgggccaggcgcccggcgcgctcgatgcgcagctcgacgccccgcaggccatgcccgcccccccggacgacctggcgctggcctttccggccgaaacactgcgccagcgccccgatgtgcgccaggccgaggagcgcatcagcgccgcgctggcccgggtctcgcaggctgatgcggcccgctatccgagctttcgcatcagcggctcgctggggctgcgggcgctcacgctgggggccttgggcaacggggctttggtggcgcacgcgctgctgggcggcatttcggtgccgttgttcgacggcggcgcagcccgcgcccaggtgcgcgtgcaggaggccgcgctggagcaggcgcgtgtgggctacgaagccaccgtgcttgccgccctgcgcgaggtggaagacgccctggtggccctgcagggcgaacgcgagcgtcaggtgcgcctgcaggccgccgcacaggccgcaggcaacgccgcgctgctggcacagaaccgctaccagagcggcctgatcgacttccaggcggtgctggaaacccagcgcaccctgctgtccacgcaggacggcgtggccactagcgcggccaatgtcgctctgggtcatgtgcgcctgtacaaggccctgggcggaggctggcaatgagacgttggagccccctgtgtcgctccggtttcaatcgccgcgggtgatgcgacgcaccatgaaaaaatgaaatgaagttccacaggctgtgtagccccctgccatgacaagcaccgaaaaaaccacccctgccaccaccaagacccctcccgccgatctgcaggccctgctgggcggtgaactgccccggcgctggtggcaacgccccgtgctgtggggcggtctggccgtcgccgtgctggtggcgggcgggttttggtactggcaggcgcagcagcgcaccagtgccgcgcccacctacgtcaccgaagaagtgcgccgtggtaacctcacgctcagcgtctcggccaacggcacgctgcagcccacacgctcggtcaatgtgggcagcgagctgtcgggcacggtgcgcagcgtgctggtggacgtgaacgaccgggtcaagaagggacagttgctggtggagctggacaccgccaagctgtcatcgcaggtactgcgctcacgcgcctctctggcctcggcccatgcgcggctggcgcaggcggcggccaccaccaaggaggtgctggccggcctggcgcgactggaagaagtggcacgcctgtcgggcggcaaggtgccgtcggcggccgagctcgatgcgggccgcgccaacgtggagcgcgcccgggccgacgaaaccagcgcccgcgccagcgtcgaagacgccaaggcggcgctctccaccgacgaaaccaatctgtcgaaggcgtcgatccgctcgcccatcgacggcgtggtgctgacgcgcagcgtcgaccccggcaacgccgtggcggcgtcgttgcaggccgtgacgctgttcaccgtggccgaggacctggcgtatttgcaactgcaggtgaatgtggacgaagccgacgtgggtgccgtgcaggtgggacaaaaagccagcttcaccgtcagcgcctatccttcgtgcaaatacccggccaagatcacccgcgtggcctacggctctaccaagaccgacaacgtggtgacctacatctcctggctgcaagtggacaactccgacctgagcttgcgccccggcatgacggcggcggccaccatcacttctaccgaacgcaacgacgtgctgctggtgcccaacaccgcgctgcgcttcacgcccgtgaccgctgccgatacaccggggggcgcaggccccgccgcgtcatcgggcggcggcatcatgtcgcaactgatgccgcgcatgccgcgctcgggcactcgccggggcgccgggggcaacggcaagagcgatgcggcgggcaagacccgcccgatctgggtgctgcaggatggtgtgcccaaggcggtcaacgtcaccgtgggcatcagcgacggccgcatgaccgaggtcagcagcgatcagctgcagcccggcatggccgtcatcaccgaccagcgcagcagcggggccgcgccatgagcactttggcccagcccctgatccgcctgcgcggcgtgaccaaggtgtacggcgaaggcgggctggcctttcaggcgctcaagggcgtggatctggacattgcccagggcgactttgttgccatcatgggtccgagcggctcgggcaagtcaacggccatgaatacgctgggttgtctggatcggcccaccaccggcgaatacttgttccagggcgtgcatgtggaggcgctctcgcgcgacgagcgcgcgcggctgcggcggcgctactttggctttgtgttccagggcttcaacctgctggcacgcacctcggcgcaagaaaacgttgaattgccgctgctctaccggggcgagccggcccgcgcgcgccacgcggcggctgcccgtgcccttgacgcggtgggtctcaagggctgggagcaccacaccccggccgagctgtcgggcgggcaacagcagcgcgtggccattgcgcgcgccatagtcaccgaaccggccgtgctgctggccgacgagcccacgggcaacctcgacacgcaccgcagcctggagatcatggaactcatctggcggctgaaccaggagcacggcattaccgtcatcatggtcacgcacgagtccgacatggccgcgtacgcccggcgcatcgtgcgctttgtcgatggcgtggtcgacagcgacacccccaacccgcacccggcgggtctgcacgccgcagccgcagcagccacggagccccactgatgctgctcaacaccctgctgctggcgctgcgctccatccggcgcaacctcatgcgctcgttcctcaccatcctgggcatcgtgatcggtgtcagcgccgtcatcaccatggtcacgctgggcaacggcgccaccatggcggtgcagaaccagatctccggcctgggcaccaacctcctgcaggtgcggcccggccagcgcatgggtccgggcagcggcggcgccccggccttcaaggacaccgatgccgacgccattgcccagcagatcggcggcatcctggccgtggcgcccgaggggcgcaccggcgccaccgtggtggccggcgggcgcaactggaccaccagcgtcatcggcagcaccaatgcctggttgcagaccggcaactggacagtgcgcagcgggcgcgagttcaccgacgacgaactgcgcgccggcgcggcggtgtgcctgatcggcgccaccgtgcagcgcgagctgttcggcagcgccgacgccgtgggccagcagctgcgcgtcaaggcgttttcgtgcgaggtcaagggggtgctcggctcgaaagggcagggcgcctttggcaacgaccaggacgacgtggtgctggtgcccctcaagaccctgcagcgccgcgtgaccggcagcacgcgggtacagaccctgctggtgtcgatgcaggacggcagcgaccccgagcgcgtcaaggccagcctgaccgaactgctgcgcgagcggcgcaagctggcccaggcggatgaaaacaacttcaacgtcctcgacaccaagcaactggccgacaccctctcgggcaccaccaaggtcatgaccatgctgctgggcgccgtggcggccgtgagcctgctggtgggcggcatcggcatcatgaacatcatgctagtgagcgtgaccgagcgcacgcgcgagatcggcctgcgcctggccatcggcgcgctggagcgcgaggtgctgctgcagttcctgatcgaggccgtggtgctggcggcgctgggcgggctgatcggcatcgtgctggccacaggcgcgtccatgctgctggccaatgtgatgaaggttccctacgtgttcaacctgggcgtgaacctgatgtcgtttgtgttctcggccggcattggtgtgctgtttggttacttcccggcccgccgcgctgcacgcatggacccgatcgatgcgctgcggcacgaatgacgcacggtgcacgctatgcatgccatggttttgctactcaaatagtagctgctgacgcttgatgggtggacgctgggggcttattttccttcaagtgcctgctgcgctgtcgtcggccagtcgcacgcagttgcggccgctgttcttggcctggtagagggccccatcggcgtgggcgatcagtgtgttggcatggaagtcgccgctgctccaggtggcagcgccaatgctgacggtaacgggcacggtcttttgctgccagacgaagggagcgctttgcaccgcctgccgcagctgctcgcccagttcgtgggcgcccttggggggcgtgtcgggcagcaacaccagaaattcttcgccaccccagcgcgacaccaggtcggtggcgcgggcgcgctcttgcagcagccgggccagcgtctgcagcacatggtcgcctgcggcatggccgtgctggtcgttgaccttcttgaagaagtcgatgtccaccatcagtgcggacaggggagttccctgccgctgtgcgcgcagtgcctcctgggccatgaagtcgtctgccgcgcggcggttgggcaggccggtgagcgcatcgtgggtggccgcctcgctgagcttgtgttgcagcttgtacagcaccacgcccatcagtgccagggccatgctcagcgaaagaaacagccagcccagggcggccagcatgccgatggactggtcgagcctgtcgtcgcgaatgatctgtgcagggtccagcagcacaaaaagggcgcgcagaaacagcagcgtgcaaccgaagaccgcaggcgcgctcatcaagagccccagaagtcggtgcgaccgggcgttttcctgtcgaatgcagtgcagcagggccaccgcattccaggcacacagtccacccgtcaacacagagacggcggcgatgcgccacatggcctgttctggcgccagccagatccactgcaccagaccggtgagaaccagcaaggtgagaaacaccaggtctgccggaggccgcccggtcatcaggtgcagcccgcgcaactgcaacaagagggcagaaaccagcagcatgttggaggctgccagaacagaaaaaccgggccagttggcgctgttgaggtagaggaagaaggcgccaccttgcagcaatgcaaaccccgcccagtgcagggcggccgcgcgcatgggcggcagcagggccgccgcgatgagccagcccagtgccagaaagcactccagcaggatgccgaccagcaaggtggcatgcgctgcggagagggtttccagtgaggccatggcggtcgggcgggcaggagccagccggtctccggcaagccccgctctctacccgctgtgtggaggatgtgccttcatggtatcgggtgagcgggttctgtgccacgcgtagttacagaccccgcaaggcgaatgtttcaagcaaaaaccgcccgaagcgcttgctgtacgggcggtttaagctatgctaaaagtagcgttgcggatttcagtgcacaacgatttccaccgccttggcggccgggggctgcttggccagggtcagtgtgagcacgccattctccaggcgggcggtgctggtggcggtgtcgatgtcctcgggcagctcccaggcgcggtgcacatggcgcggggcgccttcgatgctcttgagcaccacccgcttgccttccagcgtgatctggagctgctcgcgggccagccccggcacgtcgagctgcagcgtggtggccttgtcgtcctgagtcaccgtgtagtcggccgggcgcgcagccgccgggcccgccagggtgcccagcagaaagcgttgcagtgccacatcggaagggcggggcgcgcgggtggcgcggtgggtggtcaggggggtgaaaatcatcagggttaactcctatacactgcgcggctgccgttgtgttgaccgcatgccctgcagttaggtgtgcctttaccgatttcaaggataaaaaaccatgctgaattttcaccttgcaccgttgaaattcgccgtccaggctccacggcgcctggcgctgggggtggcgctgtccgtggctgcggccattccggtgggccacgcccagacggcggcgcagggcaccagcgccccggcagcgcctgcagccgcacccttcaaggtggcgctgatcgagagcctttcgggggctttcgccaacacgggcgaggcggtgttccgcaatatcttctgggccgtggaccgcgtgaatgcgcgcggtggtgtgttgctgccggcagcggcgggcggtgcccgtccgttggcgctggcgcgctacgacagcaagggccagaacgaagaagcgctgtcggccctgcgcgcggccattgacgatggtgcccgggtggtcatgcagggcaattcgtcggccacggctgcggtgctgatcgacgccatcaacaaacacaacgagcgcgagcctggcaagcgcgtgctgtttctgaactactcggccgtggaccctatcctgacgaacgaaaagtgcagtttctggcatttccggtttgatgcccatgccgacatgcgcatggccgccctcatggacgtgctgcgcgccgacagtgcgctcaagagcgtctatctgatcgggcaggactacagctttggccaggccgtgttgcgcgaggcgaagaagcagctgtctgcccaacgccccgacgtggccgtggtgggcgatgagctgcaccccgtgggccgcgtgaaggatttcgcaccctacgccgtcaagatcaagaccagtggtgcgcaggccgtcatcaccggcaactggggcaacgacctgacgctgctggtcaaggccgcacgcgaagtgggtttcaccggcagcttctacaccttctacggcaatgcgctgggggcacccgctgccatcggtgacgcgggcctgggcaaggtggtggccgtggccgactggctgcccaacgtgccgggtgcgcagagcgaggcgttctaccaggcgttccgcgagcgcttctccaagccgcaggacgactacgtgcacatgcgcatgcagctcatggtggaggcattggcccagtccatcgaggcggcgggcagcgtggacgccaccgccattgcgcgccagatggaaaaagccagcgtgcagctggccgggcgccgtggcaccatgcgcgcggccgaccaccagttccagcagccactggtggtgggcgtgatggacaagcagggccagcccggcgtgaagttcgatgtcgaaggttcgggctacggcttccgcgtggtgcgcgatattccggccgacaaggcacagcagccgcacagctgcaccatgcagcgtttctgacgattttgctcttttaatgatagctgcgagcgcaatccagaaaagcgctcgcagccatttttttatgggtggcatccaacggcggaatgggtgtctgtgcgctccgcgtggcgcgcgataccctgcgcgaaccgctccagcaaggcgtcgggcaggtcatgccccatgccgggaatgaagtcggtttctgcgccaggaatgtgccgtgccagatcctggccgcaggccaggggcaccagcgggtcggccatgccgtgcacgatgcgcgtgggcgccgtgatgcgcgcaagcagtggcgtacggtcaccatcggccacgatggccagcaactggcgcatcgaacctgcagggtgccaggcgcgctgcaccgattcgagggcgcgctcgcgcagggcctcggcttcggccgggtagccgggactgccgatggtgcgcagcatgtgaacgatccattcgaccgcggcttcctggcccgggcctttggggcgtgacagcagcgtgcgctgcactgcccagaagggccggggcagcgagcgagcgccgctggtggtcatcatcagcgtcaggctggccacccgctgcggcgcgctggccgccaggtgctgcgcgatcatgccgcccatcgaggcgccgcacacatgggcttgcgcaacgcccagggcatcgagcacgcccagtgcgtcctgcgccatgtcgctcagccggtaaggggcgcgcaccggcaggtgcagtgcgtgtcgcagccccgccagggccaggttcggcaccccggcgtggtcaaaaccctggctcaggccgatatcccggttgtcgaagcgcaccacccgaaagccccggtccagcagctctcgcaccagcggccggggccaggcgatgagctgcatgcccaggcccatgatgagcagcaccaccggggcggtgggcggcccctggtcgtccaccgcgatgcgcagcccgttggcctgaacgtgcatgggggtcaggaggttcgccaatcagcgaccccttgcctgctcacgattcgcggcgcatgcaatgggcgcggcccaggccagcggccccgcgcaagggccgccccgccgcgctgggggcgtccccctggggggaagacgcgcagcggcttgtatcttccatccgaccatcgcggtaaagtttgacggcctttttggcagccagaccggcccgtgcagtttggtagcggctggggtgttcgagcccgtccctgagtacagaacgcacggccaccgcgctggtcttcattgagcccgaacggttacgcgcgccaccgttgagcgcgcatgtacaagcatgggagttgaagatcatgtctgctttatcagtgacggtaggtatcgacgtggccaaggcacatgtcgatgtctgtgtgctgggcacccacagcgatgtccagcggtttgccaacgatattgatggccactcggcgctggctgctgccttgcagtccctggatgttggcctggtggtgatggaggccaccggaggctacgaggcggctctggcgtgcgcactgcaggccgtgggcttgcatgtggcggtggtcaatccgcgccatgcacgcgactttgccaggagcatgggccgtctggccaagaccgatgcggtggatgcccgcatgctggccgagttggcagcggtgctgatgcgccgcgatgacctggcacgctttcttcgccctgtcgccgacgagcgccagcagtggctcgccgccctggtcacgcgcaggcgccagttgctgaccatgctcaattccgagcgccaacggctgcaaattacgccccgtaagttgcaccccagcatcgaggccatcgtggcagcgatcaaggcacagctcgatgatctggagaggcagatggtgggccacgtgcgcgagcacttcggtgagctcgatgggctgctgcaatcgaccaacggcattggcccggtggccagcgcaacgctgattgctcagttgcccgagttgggcaggctcaaccgccgcgagatcgccgccctggcaggcgtggcgcccgtggccaacgactcgggcaacaggaggggccgacgcagggtgcagggcgggcgctttgagatacggcgtgtgctgtacatggccacgctgactgcagcgcgctacaacccggtcatccgggcgttctacgagcgtttgagggctgcgggcaaactgcccaaggtcgccttggtggcatgcatgcgcaaactgctgaccacgctcaacgcaatggtcagaaccggcaaaccttgggacccgtcgcttcatagtgcttgactttgaagacggttactcagggggggtcaataccactgcgtgaccatctcgggctggtgcgccaccttgaagaaccagcggcgtgcaccctgggcatcgaagcgtttccagtgcgccgggtcctggcgcagacggtcggcaatggcgtacatggccagcgggttcatgcccatgccgatgtggctggcgtgcacctcgatgttctcggtgtgggcgtgccgtggcgggttgatgctgcattgccaggccacgatgccgtcggtcttgctgtagatggaggtggtgggcacggggggcggcttgcgcacctcggccagcagctcctcgtcgtgggcctgctgcttgctgacccactggtaaaagcgccaggcattggttgccttagggtggccggtgaacggcgtgcccagcgtgatgacgctgcgcaccatgtcgggcatttccttggccatttcgcgggcgtaaatgccgcccaggctccagccgatcaggctgatcttgccgccgtgttgcgcgtgcagctgctcgatgcgctcgcggcagccttccagcacgccgtcgcgcgggccgaggttcaggccctgtttccagccatgggcctggtagccatgctgcttgaggaagcggcgcagtgccagcgtgctgatgtccgacgcgcccaggccggggaagaccagcacggcatggccgtcgcccgatggcatgcgcgagagccagggtgacactgccgccattgccatggcctcccagggtgcacgggcctccagcatgaccagccccaggccgggtggcaccaggtgcaggccggtgtcgtcgcggcaggcgggttctggccgggtcttgcggtgagatcgggaagtcatgcgtgcgccaaggttgaaagccatgcaaacatgctagcgactgcgtgcgcgggggccgggcgtgctaaccctagagaccagtcgcttgcgcgacaccttgcctgcaggcgccgtcgcctgggccgcagcgctcttgcgggcgatgcgccggggcttggtggtctcggcggctgcaggcatggggagtgcttgcagttcgtcaaaggcgccatccagcgccgctgccagggccttcacgtcgggcagggcagccgcgtcggccatgaggccgaagtccatgtgggcgtcgaagctctgcaccgtgatgttcagtgccagcccatgcaccacgatgctggtggggcagctggcgcgcacgcgcgcaccggccagatagatcggtacctgcgggccgggcacgttggagatcaccacgttggccacctgcggcaggcggtcggccacccgggccttgccgtagagagaggctgccgcttccatcagccagggcacgccaatggatggaaaatcggtgggcaggatgcttttcatctggcccatggtcgtcttcatggcgctgctggctgcacggatgtgcgccaggcgccgggccggattggccaggtgcgtgcccaggctgatcaggctcatcgaggcctggttgtcgggccgcgtgtcgcccgacgggcgcagcgagatcggcaccgcggccaccaggcttttgcgcgggagttgctggcgttgctgcaggtaacggcgcagcgcgcccgcgcagagcaagagcaccaggtcgttgagcgtggcctcatgcgccttggccagcgccttgagttccttcagcggcacgctggccgaggcaaacgcccgggtgcagccgaccgtgacgttcatcggcgtggcgggtgccagcgtgacattgccgctgcccttgccgagcagggtcctgatactgaacgcgcccctggcggtgcgggccaccgtgcccagcgtggcggggagcgcgcgtgccatgcgcaccacctggtccacttcgttgccgagggcgccgcgcagcatctccgccatgccgatctcgaaggtcttgcgccgcgtggagggtcgcagcgcgatgtcgcgcggctcggggctcaggtcaaacagcacgttggccagtgccactgcggcctggccgtccaccgccgcatggtgtacctgtgtgtacacccccacctgtttgtgtccgctggcgctgcgcggcaggccctcgatgacatacaggcgccacaggggcttgctgcggtcgagcagttgcggatgcagggccgagatggcttcttccagcagcgtgcgggcgtccggtgttgccgtttccttgcgggggcggctggggagcttgtgttcaacgatgtggtaggccagatcgggctcggcatccacccacaccgggttggccaggttcagcggcatccaccacaggcgccggcgcagggccggggtggcgggcatgcgcgcggcgtagtgtcttcgcaggtcgttcacatagcggccccggtagtcggcaggcaactccagcaggaccatggcgcccacgtgcatgggcatttcgggtttctccaggtagagaaagctggcgtccaggcctgatagctgcttcagtggcatgcgggtctccttcggggcgttccggcgttacacaggtgctgtgggctggaaagccattgtggaggagcgcaccgtatttgcgtggtgcctgcgcgaccgagtccctcagggtatgcaccgaggaaatgccccgttcacacaacgaaaccagatggaatgggccctgcctttggccgcagtcagctggcaaacccgtacgcagccccttcatgcttggccttgtacatggccgtatcggcctgtttgaccagagcctctgccgagtcgccatcttgcggaaagcgcgcaatgccgatgctgagcttgatgctgacctggccgacgaaaagctggcaaggcgcttgaatgtggctggcaatcttttgggccagatggctcaccgactgcttgtcgcgcacacccatgacaaggaccaggaactcgtcgcccccgatgcggctgaccgtatcgtcgtcacgggtgttctccttgaggcgatcggccaccgtctgcagcacggcatcgcctgcgtcgtgtccatgctggtcattgatggctttgaatccattcagatccagaaaaaacacggccaaggtcagcccgtgccgccgggcctgggccaagccgtgctccagccggtcgttgaacagggagcgattcgccaggccggtgaggttgtcgtggagcgccgcacggcgcgccaccagctcctgttcggtgaccacggccaactgcacttccaggtcctggcgttcactgacctctgctttcagcgcctgcgttacggccgccagcttccctgaggcgtcctgcactttttcctccaccgcctggcttttctgcaaggctgcatgcagctggacggacaggccttcccgccccacctcgtgcttgagtgaggagttgatcgcagaaagctctgaagcgctttgttccaccaggtctttgacatgttcagtcgttcccaggactttcgtcagggtgcgggcggcggccgcacccgggggagcgttggagttgggggtcatgacggggcccgtgctacgagaatcagcgcagattaggcgcagtcgagacagccgtcagtgcgccagcgcacgcaacggcaggcacccccggatagcgtccacggtttgcgggctgcagttgccagagctgaaccctatcgcgccgcagcagtggggtggatagcccgcagcacgcatcgggcgggcgactccccgggcgcgatcgcctgtttactgtgccgcctcgcgcgccgccttcacggcgttccccagctcgatcactgccatggcgtagtagctggaccagttgtagcgggtcaccgcataaaagttttcggttccggccacgtagcttggagactcgttgccgttctgcagctcgaccagggccagcgggccggggtggcgggcgccggtttcgccgagtgcggcgccgcgcgcctgcatgctggcggcgctgaaggtgggcaggatgtcgggcgccaacagctcatcttgctgcgcgggcgtgccctccagccgcacttcgaaatgcgtgggcatacccggttgccagccgtggccgatgaagtaattagcgaccgagccgatggcgtcctgcgggctgccaaacaggtccacccggccgtcgccgtcaaagtccaccgcgtgccgtacccagctcgacggcatgaactggggccagcccatggccccggcgaagctgccgcgcggcgtgaacgggtccgtgttggtgcggtgcatcaggctgaggaactgttccagttcgcgccggaagaaggcggtgcgctcggccgcgcgcgggtgcgccgaggggaagtcgaaggccagcgtggccagggcgtccatcacgcggaagttgcccatgtgctggccgtagagggtttcgacgcccaggatgccgacgatgatctcggccggaacgccgtattcgcgctcggcctgcgccagcgtgtcggcatgctcctgccagaaacgcacgccggcgcggatgcgcacgggttcgatgaagcgggcgcggtaggcctgccagttcttcgccgtgcccttcgggggcggcagcaccaggcgcggcacctgcggcagaaagcgcgcctggccgatggcctggcgcacccattcacggttcagatcccggcgctgggccaggtcgtcggcaaacagcagggcctcggggcggctggcataggccgtgctgccttgcggggccgacggcgcggaggcccgcagggcaggttttttggagtgtttttgggctattgcgcttgtggatattgcgctggtagctaccaataaaagagcaaaagaaacggtcttgaagatcatggagcagcggggggccggggccagcgcagcctgcgcagatcgctccgcaggtggcgcagggcctggccctggtggggggattcgggtgcgtagcgcacttcttccaggcgcaccagccaggcactcacggcctcggcgtcgtcaccaaagtgggcccgggcctgggcggccagggtgcggggaggggtgctgggcgcgctgggcaggccggcacgcgccagccgggcacgcgcctggtggagcaggcgcagccaggggtcgtgttgcaggcgctcccacaacgtccagagtgcaccgcccagtgccgacgccacgagcaggccggccagcacgcgggccaggtcctgccagtcgggggcgtcaaagcccagggcgcgcagcaggtcgagctggcggctctgggtgtagttgagcacccactggttccagctattgttggccgcttcccacacggcgcgcaggcgctgcgccatgtcgcggctgatcacggtgtccaccgcggtccccagggcgccgcgcggggcctgcaggcgctggaactggcccacacgccccggcgatacggcccccgtggggtctacacgcacccagccgcgcccttccatccagatctcggaccaggcgtgggcgtcgctctggcgcacggaccagtaaccgtcgaccgggttgcgctcgcccccctggtaaccggtgacgatgcgcgcgggcacgcctgcggcccgcatcagcaccacgaaggccgaggcaatgtgttcgcaaaaaccctctttgcggtcgaaccagaattcgtccgccgtgtgttcgccatacacgccgggctccagcgtgtaggtgtagccgccggtgcgcaggcgctgcagagcggcatccaccagggcctgggtgccgccggcggccagtgcggggtcggcccgcagttgcgcggccaaggccagggtgcgggggttgttgccctgcggcaggcgggtgagcgagcgcaactgcggcgtggcggtgggggggccgtggcggaactgggggtagctctcggcacgcaggcgcaccacgtcggtcatcgggcgggagctcagccattgcaggtcctgcgtcatgaagacgaaccggcccgggacttcgggtttggtgggcgtggcctcgagcagcagcagccaggggcgctggtgggcctcctgggtgatctcgtagcgcagcggcgccccctgcacctgcaggcgtgccgccaggcccagcggggtatccaggcctggttcatcgcgcaccggctcggcctgccattcgcggccatcaaagctgctcagtaccgggccgcgaaaatacaggatcgactgcggtggggtgaagttcgggtcgtcaaagcgcaggcgcagcgcaatgcgctcgtccagcgccagttcggcaatgctgcccaccttcatgctgcccgacaggccgctgcgcccgccgatggggtcgccgggcatgccccacagcggcgccatgcgcgggaagaacatgaacagcgcggccatgatgggcgcccccagcagggccagggtgcccgccgtgcgcatcgcctgcgccagcggcgggcggcccacgggcatgtgggcgttgaccagcgcggtcagcaggcccagcagcgccaccagcatggccaccgccgtggggagggactgggagtagaaaaaattgctgagcatcgtgaagaagcccagaaagaagatgaccagcgcatcgcgctgcgcacgcgcctccagtgtcttgagcgcgagcaacgcgacgatgagcgtgaccccggcatcgcgcccgaggatggtgcggtgggtaagcagtgtgcctaccacggccagcaccagcaccaggcgcagcagccagacgttgggcagggggcgccccgtccaggccagcccaccacgccacagcagcatggtgcccgccatcacactggtccacaggggcagaacgtcggtttgcggggcaatcaccagggcgatgacgacaagcagaaacagcgtgtcgcgggcatcccgtggtagcgatgccaaggtctggcgcagtgtcatggcgcctcctgtgtgctatctaaatagcagcttgatgcgcttgatgggagagcgcttgaggctattttcatactaaatttttctagcacagcgccagggcctccaggcagttgcggcggtgggcggggccgctgtcctgggcgatttcccggccgggcaggcgcaggccatagttcaggcccagccggtcggcctgcagcacccaggccgtcaggcgcgagagccgggcctcggggtcggccagacccgtgtgtgcggtgtcgagccacagctcgtggcgttgcgactgctgcgcgtcgcggctgaccagggcgtcggagccgctggccagggcctgcgcggcctttttccacaccaccagttgcagcgggtcgccccggcggtaggcacgcacgccttcaaaatcgcccgtgccatgggtgggcgcactgccggtgccgcccgcacgcggctcgcccggcggcaggggcggggcgccgggctcgggcgcggggtagatcagcacctcggctgccgggcgccacaccgtccagacccggaagatgcccagcgggtagcgcgtctcggcggtgagggtggggacgcggtgcaggccgcgccgcgtgggtgtgaacgccacctgcacgtgcgcgatgccctgagcgggcacatcggtccaggcccagtggccgctgccgtacaccgccagcgcgatgctcaggcgcggcgtgcgccgttcgctggccagttgcacctgcagcgcagcgccctggcccaaaaaaagcggctcgggcggcttgaggtgcaggctcagcccgcgcagcgtggcatggcagaaatgcatgcccgccacggcgctgcctgccagcaaaaaggtcagcagatagcccaggttgagctggaagttgatggatgccaccagcagcaccagcagcgtgagtgccagcatccagcccgcgccggtgggcaggatgtacacattgcgctgggtgagcacggtggtgtccgtcagcggcaggcgggcctgccaccagcgctcgaagcgcttgcgcacggcatccaccgggtgaaattcccgggggcgtggcagggggcgggcgggggtgctttccatgggggggcgttcgcaccttcttagggcaggtccaccgcagcgaccatggcgtgcacctgctccacggcgccacgcccggcatcgcccacgggcacgaggcggtgcgcgatggtctgggccacgatggcctgcacgtcgtcgggggccacatagtcgcgcccgcagatcatcgcctgcgccttggccgcgcgcaccagcgcaatgccggcgcggggcgacaggccttgcaaaaaccaccggcccgagcgcgtggcggcgatgaggtcctgcacatagttgagcagggggtcggatgcatgcaccgccagcacctgctgctgcagctcggccaagtcctgtggcgacaccagcggccgcagcgtgttggccatttcgcgccggtcccggcccgagagcagctcacgctcggcggcgcggtccgggtagcccagcgagatgcgcatcagaaagcggtcgagctgcgattcgggcagagcgtaggtgccgagttggtcgtgcgggttctgcgtggcgatgacgaagaagggttcgggcagggggcgtgtctccccttcgaccgacacctgcttctcctccatggcttcgagcagcgcgctttgcgtcttggggctggcgcggttgatctcgtcggccagcagcacctgggcgaacacggggccggggtggaacatgaaggcttccttgccgcgctcgtacaccgagacaccgatcagatcgctgggcatcaggtcggccgtgaactgcacgcgggcaaattgcaggccaaacacatgggccagggcatgggccagggtggtcttgccgaccccgggaacgtcctcgatcagcaggtggccgcccgcgagcagacaggccacgcagtcctgaacgcgggcgctcttgcccacgatcaccgtgttaagctgatccagtatggacttgattttttgcggcgtttgcatggcgcgacgttatccgaaattctgaggcgtggagacaaggtaatgggcaagacgggttatttttcccaccgcgactgctggatgcatgaaatgggcccaggccatcccgaatgtcccgagcggctcgatgccatcgaagaccgtttgctcgtgacgggcgtgatcgatgcgctggagcgctacgaggcaccgcaggcggcactggccgatatcgagctggcccacgggcgtttgcacatcgccgccatgcgcggcctgaccgactggttgcgcgaggaggtgcaggccggtggcccggcctatacccaggtcgaccccgacacctcgatgaatgtgcatacctggagcgctgcgctgcgctcggccggtgcggccctcgccgccaccgacgccgtgatggccggcgagctggaaaacgccttttgttcggtgcgcccgccgggccaccatgccatgcgtgacaaggccatgggcttttgcttcttcaacaacgtcgccgtggccgccaaatacgcgctgcagcgctacaacctcaagcgtgtggcggtggtggactttgacgtgcaccacggcaacggcaccgaggacatcctgtcgggcgacgagcgcgcactgatggtggggctttttcagcacccgttctacccgttcagtggcgacaaggaccccgcacccaacatggtcaacgtgcctgtggcggcctacacgcgcggcatggatatccgcgagatcatcgagatgatgtggattccgcgcctcgacgccttcaagcccgagatgattttcatcagtgccgggtttgacgcgcaccgcgacgatgacatgggccagctcggcctgaccgagcaggactacacctggatcacccagcgcatcaaggacgtggcacgccgctactgcaacggccgcatcgtttcgtgcctggagggtggctacgtgatgagtgcgttgtcgcgcagcgtcgaggcccatgtgcgcgtgctggcggatttgtgaacccagggggtggatgcaatgatggatatggcaatgccccttggtgtggcgcgcgatgcacgtggtgtggtcactctgaccctgaacgatcccgcgcgcttcaacgcgctgggctcggagatgctcgtggccctgcagcaggcactcgatgcgattgatggtgatgaatcggtgcgcgtggtggtgctcgcaggtgcgggcaaggcgttttgcgccgggcacaacctcaaggacatggcttcccaccccgatctggcgtggtaccagcagctctttgcgcagtgcagccgcatgatgttgtcgctgcacaagctcagcgtgccggtgatcgcgcgcgtgcatggcatggccacggcggcgggttgccagctggtggcgcagtgcgatctggccgtggcggcggacagtgccagctttgccaccagcggcatccactacggcctgttctgctccacgcccagcgttccgctggtgcgcaacgtgccgaccaagcgcgccatggaaatgctgctcaccggcgacttcatcgatgcggccacggcccagcaggaaggtctgctcaaccgtgtcgtgcccctggacgcactggacgcggaggtggaaaaaatcgtgcagtccatcctggaaaaaccccgcgtcgccgtggccatgggcaaggcgctggtgtaccgccagcgcgagctggggctggacgccgcctaccaactggcgggccagaccatggccgtgaacatgatggacgaggcggcccaggaaggtgcgcgcgcctttgtcgaaaagcgcaagcccgggtggaagtgctgatggcaggaaaagtgcagtctccggtggccggagggtttgatgcttggctggaagccttccttcagcccacggtgctgatcgaattgggcgccctggcgctgtgcgtggcactggcctgggccctcgtggctctattgcgacggggcctgcgccagtccgatggcagatccatcctgtttgggcgcagcgtgtttgatggtgcgctgttcccgctggtattgctggtactcggctatgtggctcgcaccctgttgctgcaatgggtgccgctggcggtattcatggtggtcattccggtcctggtgtcgctggtggtcatccgcattggcgtgaaggtcctgcaggtggcctttccgcaggctgcatgggtacgcccgatcgagcgaaccatttcgtgggtggcctggctgggcatggtgctgtgggtgacgggcctgttgccgctggtgcttcatgaactggatcaaattgcctggaaggtcggcgggaccaccctctcggtgcgcaccatcatcgaaggttcgctgaccgccgctgccgtgctgctgctgtcgctgtgggtgtctgccgccatcgaggcgcgactgctgcgttctgccacagggagcgaattgtccttgcgcaaggccgtgagcaatgccacgcgggcgctgttgatgttcgtgggcctgatcatggcgttgtcggccgtgggtatcgatctgactgcgctgtcagtgctgggtggcgccatcggggtcggcatcggctttggtctgcagaagctggcgtccaactatgtcagcggttttgtcatcctggccgaacgcagcatgcgcatcggcgacaacgtgcgcgtggataacttcgaaggccggatcacggacatcaatgcgcgatatacggtggtacggtcgcctgcagggcgtgagtccatcgtgcccaatgagatgctgatcattcagcgcgtcgagaacctgtcgctggccgatccacggatctggttgtccaccgtggtcagcgtggcctacgacagcgatgtcgaacttgtcatgcgactgttgaccgatgccgcactgaccagtccgcgtgtcctgcatgaccccatgcccagcgcttcgctatcggcttttggtgccgacgggctggagttcacggtggggttctggattgcggaccctgagaacggccagttggggctgcgttcgcagatcaacctggccattcttcagtccttgcggacgcatggcatcgagattccctacccccagcgcgtgctgcatgtcacacatccgggcggcggagcggcagtgcccggagttgcgggcgccccacggggctaaacgctgcagggcaggttgttcttcaggggcgggacaggccgcagcggcgatctgtggtgcgccgccaagtcggccatgtgacagaaagaagtggacaaaagggcgcgatgctggcctataatccacaaaaagcacgatcgttcgtttttgtcgatacgcccccttgggaaaatgcatagccgatgtgctgcggtgcgacataaaatggtttggtttacgtaacgtcaattcaatcaactctaggagccgcagcaatgaaggttttggtccctgtcaagcgcgtggtggactacaacgtgaaggtccgtgtgaagtcggacggcacgggtgtggacatcgccaacgtgaagatgagcatgaacccctttgacgaaatcgccgtcgaagaggccgtgcgcctgaaagaaaaaggcgtggtgaccgaagtcatcgccgtcagctgcggcgtagcgcagtgccaggagaccctgcgcaccgccatggccattggcgccgaccgcggcatcctggtggaaaccgccgaagaactgcagcccctggccgtggccaaactgctcaaggccctggtggacaaagaacaacccggcctcatcatcctgggcaaacaagccatcgacgacgacgccaaccagaccggccagatgctcgccgccctggcagacctgccccaggccaccttcgcctccaaggtcgaagtggccggtgacaaagtcaacgtcacccgagaagtggacggcggcctggaaaccctgagcctcacgttgcccgcagtcatcaccaccgacctgcgcctgaacgagccgcgctacgtcacgctgcccaacatcatgaaggccaagaaaaagcagctcgacaccgtccgccccgaagacctcggcgttgacgtggccccgcgcctcaagacgatcaaggtggcagagcccgccaagcgcggcgccggcatcaaggtgcccgacatcgccaccctggtcgacaagctcaagaacgaagcgaaggtcatttgaccccccctgagtcgcttcgcgccttccccccagggggacgacaccctcggtgcggggcggcccttcctcggtgtccctcgcatcggccccgggtgatcgatcactgcggttaatgcagacaccctccaagattcaagagaaagacgactgacatgacctctctcgttattgcagaacacgacaacgccagcctcaagggcgccaccctcaacaccgtcaccgcagccgcccagtgcggcggtgacgtacacgtgctcgtcgccggccacaacgccggcgccgcagcacaagccgcctccagaatagctggcgttgccaaggtgatccacgccgacggcgccgccctggaacaaggcctggccgaaaacgtcgccgcccaggtgctccagatcgccggcaactacagccacatcctgttccccgccaccgccggtggcaagaacgtcgccccccgcgtggccgccaagctcgacgtggcgcagatcagcgaaatcagcaagatcgacagccccgacaccttcgagcgcccgatctacgccggcaacgccatcgccaccgtgcaaagcgcagatgccgtcaaggtcatcaccgtgcgcaccaccggctttgacgccgccgccgccaccggtggcagcgccgccgtggaaaccgtggctgctgccgctgccaacggcaagaccagcttcgtgggccgcgaagtgaccaagagcgaccgccccgaactgaccgccgccaagatcatcgtctccggtggccgtgcgctgggcagcaaggaaaagttcgacgaagtcatgacaccgctggccgacaagctgggcgccgctttgggtgccagccgcgcagcggtggacgcgggctacgcgcccaacgactggcaggtgggccagaccggcaagatcgtggcaccgcagctgtacatcgcagcgggcatctcgggtgccatccagcacctggcgggcatgaaggactccaaggtgatcgtggcgatcaacaaggaccctgaggcgccgatcttcagcgtggccgactacggcctggaggcggacctgttcacggccgtgccggaactggtcaaggccctgtaattccatttctaaatcaaacgagtactttgtcggctttgcttgccgtgctacagcactgtctgcgcttcgccttcgcgtactcgattgattgagaagcggaataaagcctcgtcgcccgcaaaaaggcatcgcttgcgatgccttttttttgacattgcatccccccggagaaccctatgagctacaccgcccccatcaaggacatgctgttcgacatgcagcacctggcccacatcgaacagatcgcgcagatccccggctttgaagacgcaggctttgataccgcgcaggccgtgctggaagagtgcgccaagttcactgagggcgtgctggctccgctgaacttcgagggcgacaagaacccttcatcctggaaggacggcgtggtcacggccactccgggcttcaaggaggccttccgccagctcaccgagggcggctggcagggcctgcagcacccgcaggattttggcggccagggcctgcccaagaccattggcgcggcctgcatggagatgctcaacagctccaacatgagcttcgcgctgtgccccttgctgaccgacggcgccattgaggcgctgctgacggccggcagtgacgaactcaaggcgatctacctcgaaaagctcatctccggccagtggaccggcaccatgaatctgaccgagccgcaggccggctctgacctggcgctggtgcgcaccaaggccgatccgcagcccgatggcacgtacaaaattttcggcaccaagatcttcatcacctggggtgagcacgatatggccgagaacatcgtccacctggtgctggcccgcgtggcgggagcgcccgagggcgtgaagggcatcagcctgttcgtcgtgcccaagttcctcgtgaacaaggatggctcgctgggcgcgcgcaatgacgcgcactgcgtgagcatcgagcacaagctgggcatcaaggccagccccacggcagtgctgcagtttggtgaccacggcggcgccgtgggctaccttgtgggccaggagaaccgtggccttgaatacatgttcatcatgatgaacgccgcacgctacggcgtcgggctgcagggtgttgccatcgccgagcgcgcctaccagaaggccgtgcagtacgccaaggaccgcgtgcagagccgcccggtggacggcagcatcaacgccagtgccgccatcatccaccaccccgacgtcaagcgcatgctcatgaccatgcgcgcctacaccgaaggctgccgcgccatggcgagcacggcggtggccgcctacgacgcggcgcaccaccaccccgatgcacaggtgcgcaaggacaacgccaccttctatgaattcatggtgccgctggtcaagggctacagcaccgagatgagcctggaggtcaccagcctgggcgtgcaggtgcacggcggcatgggcttcatcgaggaaacgggcgcagcgcagtactaccgtgacgccaagattctgaccatctacgaaggcaccaccgccatccaggccaacgacctggtgggccgcaagacggcgcgcgacggaggccagtcggcacgcgccattgccacacagatcgagaagacagaaggcgaattgcaagccagcggcacgcccgctgccctggccatggcccggcgcctggcggccgcgcgccaggcctatctggacgtggtggacttcgtctgcggcggcgccaaggcttcgcccaacgccgtgttcgcgggcagcgtgccctacctgatgctcgcgggcaacctggtggctggctggcaactgggccgctcgctgctggtggcccaggacctgttgcagaagggacaggatgaggctttcatgcgtgccaagatcgccacggcgcagttctatgccgagcacatcctggtcaaggcgccgggcctgcgcgacagcatcgtcgaaggcgccgagagcgtgacggcgcttgcgctggactcgttctgagcccgtaccctggccctctgcatcgcaggggggcagggttgctatataaataatagctaatggcgcccgtttataaagcgcttgaggctgatttgactcatattttcgattcaacggaaagccaccatgtccaagctgcccccggttctgcagaagctctcgctgcccgtcatcggctcgcccctgttcatcatcagcaaccccaagctggtcatcgagcagtgcaaggcaggcatcgtgggttccatgcccgcgctcaatgcccgtccggccgagctgctggacgactggctcgcggaaatcaccgaaaccctggctgcctgggacaaggcgcacccggagcagccctcggccccgtttgccatcaaccagatcgtgcacaagagcaacgaccgcctggagcacgacatgcaggtctgcgccaagtacaaggtgccgatcgtcatcaccagcctgggcgcgcgtgaggatgtgaaccaggccgtgcacgcctggggtggcatcgtgctgcacgacatcatcaacaacaagtttgcgcacaaggccgtggagaagggcgctgacggcctgattgccgtggcggccggtgccggggggcatgcaggcgtcaagagcccgtttgcgctgatccaggaagtgcgtgagtggttcgacggcccgctggcgctgtccggttccattgcctcgggtggtgccatcctggcggcccaggccatgggcgccgacttcgcctacatcggctcggccttcatcgcgacgcacgaggcgcgcgccgccgaggcctacaagcaggccattgtcgaaggcagctcggacgacatcgtctacagcaatctgtttaccggcgtgcacggcaactacctcgcggcctcgatccgggcggccgggctcgaccccgaaaacctgccggtctccgatccgagcaagatgaacttcggcggtgacgccaagaaggcctggaaagacatctggggctgcggccagggcattggtgtcatccgttccgtcaccagtacggccgagatggtggcacggctgcgcagcgaatacgaggccgcgcgaacccgcttgctggagcggtagttccctgtggctccaggggcttggggttacttgatgtcagtcagtggcatgtaagtgcatggatggagagtctcgggtgatctttcaccgattttcaggagacacaaccatgagtgcgccatcgaacgccattgaatccaccctggtggaaaaccgcgtcttcccccccaccgaggcagtcgctcaggccgcacgggtgtccggcatggcaggctacgaagcgctgtgcgccgaggctgagcgtgattttgaaggtttctgggcgcgcctggcgcgcgagcacctgcaatggaacaagcccttcagccagacgctcgacgaatccaacgcaccgttcttccgctggtttggcgacggagagctcaacgcctcggccaactgcctggatcggcatgtgggtacgcccaccgagaacaagaccgccatcattttcgaggccgatgatggcgcagtcacccgcatcacctacaaggaactgctcgcccgtgtgagccagttcgccaacgcgctgcagtcctgcggcgtgggcaagggcgaccgcgtgctgatctacatgcccatgaccatcgagggcgtggtggccatgcaggcctgcgcccgcattggagccatccacagcgtggttttcggcggtttcagtgccaaggcggtgcaggagcgcatcatcgacgtcggtgccgtggcggtgatcactgccaacttccagttgcgcggcggcaaggagttgccgctcaagggcatcatcgacgaggccctggccatgggcggttgcgacgccatccgcaacgtgctggtgtacgaacgcaccaagaccctctgcaacatggtggcgggccgtgaccgcacctttgcccaggtgctggaaggccagagcaccgaatgccctccggtggccgtggacgccgagcacccgctgttcatcctctacacctcgggttcgaccggcaagcccaagggcgtgcagcacagtaccgggggctacctgctgtgggccaagctcacgatggactggaccttcgacctgcgcccgagcgacgtcttctggtgcacggccgacatcggctggatcaccggtcatacctatgtggcttatggtccgctcgctgcaggtgcaacccagatcgtcttcgagggcattccaacctacccgaatgccggccgcttctggcagatgattgagcgtcaccagtgcaccatcttctacacggcaccgacggccatccgttcgctcatcaaggcggccgagggcgacgcggccgtgcaccccgcgcgctccgacctctccagcctgcgcatcctgggcagcgtgggcgagcccatcaaccccgaagcctggatgtggtactacaagaacgtcggcggcgagcgctgcccgatcgtggacactttctggcagaccgaaaccggtggccacgtcatcaccccgctgcccggagccacgccactggtgcccggcagctgcacgctgccgctgcccggcatcacggcggccatcgtggatgaggccgggcaggatatgcccaacggcgcgggtggcatcctggtcatcaagcgcccctggcccagcatgatccgcaccatctggaacgacccggaacgcttcaaaaagagctacttccccgaagaactcaagggctactacctggctggtgacggtgccgtgcgcagtgccgaccggggctacttccgcatcactggccgcatcgacgacgtgctcaacgtctcgggccaccgcatgggcacgatggagatcgagtcggccctggttgccaagaccgaccttgtggccgaagccgccgtggtagggcgtcctgatgatgtgaccggcgaggctatctgcgctttcgtggtgctcaagcgatcgcgccccacgggcgaggaagccaagcagatcgccaacgagctgcgcaactgggtggccaaggaaatcgggccgattgccaagcccaaggacatccgctttggcgacaacctgcccaagacgcgcagcggcaaaatcatgcgccgcctgctgcgctccatcgccaagggcgagcagatcacccaggacaccagcacgctggagaatcccgcaattctggatcagttggcccagaccaactgatccagaagggcgccgcaaggcgcccgcgcgtggcgctcgcgggattcgggggcactcatgtcgcgcagcgacgtgatgtgaccacagaacccggcggaaatctgtttggcccagaccaactgatccggaagggcgccccacctcaaggcgcccgcgcgcagcgcttgccggaatcggggtcactcatattgcgcagcaatatgagtgaccgcaaaagcccgtcaatcgggctgagcgcgtgctcaaagctacggccccatatatccaaacggcgccgcaatacacccgcatgcagtggtgtgcgtgacgacagctttccgcttcaacctaaaaaccgcagttggatgtgcctgccagtgccgtgatcggcgtgccaggcaaggcgcgacgacgcagcgcactcctgtgcgcaaggagaagcaacgccgcatggcgcgttgagcgcggtgctggcaggcgcatagcgctttcacccacacggtgaaccgcaaagaggcccaggaagtcaactgccataaggactttccaagaaaaacaagcggtcaactgcggtttttaggttcaataccccggcctgatattcatgcccggggtttgtgtgattgcgggggcacaaaacaaaacggccacatcacgcaggcgatgtggccgtaggtgcaaggcgctgagcgccctgaacggaatgcttacttggtggccagaacccaggtcgccagcttcttggcgtcggcttcgttcacttgcgtgttggcaggcatgggaacaggaccccagacgcccgagccacccttgatgatcttggcggccagcttgtccactgcgtccttttgacctgcgtacttcgcggcaacgtccttgtacgaagggcccacgagcttcttgtcaacagcatggcaggccatgcagtttttcgacttggccagcgcttcgtcggccagtgcgggggctgcaacagacagcgtcatggcgagggcaatcagagtacgcttcatcgtggtctttcctgtgggttgagttacattgctaataacggaattgtagtgattcaggttgaccgcatccgataatctccgcacttttttgagggataaccatgtacatgctgggtctggggatcattctggcgcttctgaagtaccttgaaatcgggcccgtggccgcctggtcgtggtggtgggttctttcgcccttcgcgctcaccattctgtggtgggcctgggcggattcaacgggttacaccaagcgcaaggccatggaaaaaatggacgagcgcaagcaggagcgcatcgacaagcagaaagaagccatgggcatgcgcccccgcaagcctcgctgactgcggctttctcgtctggcgcacgctgtggcgccatgcgccttcccgtgcacggagggcgggcaggccaactggacacccaatccggctgcgagtgcgctgtttgtccctgtttgcggtgtgccgggcctcgggcgcatccctcccgcaacaggcctgtgggacataatccagcagattttccatctcattttcccagtaatcccacggacgaagaatcaccatgccagcctaccgttccaaaacctccaccgccgggcgcaacatggcgggtgcgcgcgcgctctggcgtgccaccggcatgaaggacgatgattttcagaaacccatcatcgcggtggtcaattcctttacgcaattcgtccccggccatgtgcacctgaaggacatgggccagctcgtggcgcgcgaaatcgaggccgcaggcggcgtggccaaggagttcaacaccatcgccgtggacgacggcattgccatgggccacgacggcatgctgtattcgctgcccagccgcgacatcattgccgactcggtcgaatacatggtcaacgcgcactgcgctgacgccatggtgtgcatctccaattgcgacaagatcacccccggcatgctaatggccgccatgcgcgtcaacatccccgtggtgttcgtctcgggcgggccgatggaagcgggcaaggtccaactggccacgcccggcacccacgccctgacgttcaaaaagctcgacctgatcgacgccatggtgatggcggccgacgattcagcgtccgatgccgatgtggccgaggtggagcgcagcgcctgccccacctgcggctcctgctcgggcatgttcaccgccaactccatgaactgcctgaccgaggccctgggcctctcgctgcctggcaacggcaccacgctggccacgcactccgaccgcgaacagctcttcaagcgcgccggccgtctggtggtggacctgtgcaagcgctactacgagcaggacgacagccgcgtattgccgcgctcggtgggtttcaaggccttcgagaacgccatgacgctggacatcgccatgggcggctcgaccaacaccatcctgcacatcctggccattgcccaggaggctgagatcgacttcaccatggcggacatcgaccgcctctcgcgcgtcgtgccgcagctgtgcaaggtggcccccaataccgacaagtaccacatcgaagacgtgcaccgcgccggcggcatcatggccatcctgggtgagctcgaccgcgccggcaagctgcacaccgacacgcccaccgtgtacgcccccacgctcaaggccgcgctggacgagtgggacattgcccgcaacccgtccgaagccgtcaaaaccttctacctggcgggccctgccggcattcccacccagacggcgttcagccagagcacgcgctggcccagcctggatctcgatcgtgccgaaggctgcatccgctctggcgagcacgccttctcgcaagagggcggtctggcggtgctggtgggcaacattgcgctgaatggctgcgtggtcaagaccgccggtgtggacgatgccctgatggtgtttgagggcccggcccatgtcaccgaatcgcaggacgaggccgtggccaacatcctggacgacaaggtcaaggcgggcgacatcgtgatcgtgcgctacgaaggccccaagggcggccccggcatgcaggagatgctctaccccacttcgtacatcaagtccaagggcctgggcaaggcctgcgcgctgctgaccgacgggcgcttttcgggcggcacgtccggcctgtcgatcggccattgctcgcccgaggcggcggccggtggcgccattggcctggtgcgcaacggcgaccgcatccgcatcgacatccctaaccgccgcatcgatgttctgctgtcggacgaagaacttgtgcgccgccgtgccgagcaggacgcgaagggctggaagcccgcgcagccccggccccgcaaggtgtccgccgccctcaaggcctacgccaagctggtgatgtcggccgacaagggcgcggtgcgcgacctgtcgctgctggactga

SEQ ID NO: 94 - DNA, 12903 bp, Unknown
  From metagenomic library of CO183
gtggaaggctgcaggcgatcaatacaagagggctctggagatcaagcctgacatgcacgaggctgcctgcaacttgggcattgcactcgcagccgaagcatgggccgtgaaagaccatgacctagcagccgcacgcgccttatggcaggcggcgggtgagcaatacgcacgggctctgcagatcaagcctgacatgcacgaggctgcctgcaactggggcagtgcgctggatgacgaagcacaagcagtgaatgaccaagacccggcagcagcgcgctccttatggaaggcggcggatgagcaatacgcacgagctctgcagatcaagcctgacatgcatgaggctgccaaaaattggggttcgacattggcgaggcaatacgatgcgttcatcaaagcacaaggctccgttggtgccagcgaggtgcttgaaagcgcaatcaagctgcttgaatctcatagcgccaagtatccagagagcatcccccatctcgcctacaacttggcttgcgcttatgcgcttgctgggcgtaatgcagatgcattgaagcagcttgagatttctagtcgcaacggactgctcccgccacactggagagaagatgaggaccttgccgggctccgcttaaccgctgagtactcagagtgggccgaggctcagcatgcgtacgatctccaccaatgacttcacttccatgaccagcagccccgaaccgctcaaagtcctcggcatccagcaagtccccatcggcggcacctacaagcaacacataggcgcgatcatggcgggcaagggtgaatcgctggcggtggatcagatcattctggagtttcaatgaccgctggcctgggcgcggcaccttcggcgggcgggtcacatgcacttggtcggctctggcccgcgctgcggtgggtgtgcgccatcgtcggtgcggtgtttctggcggacggtctggttttgatggccctgggctacttctccatgggcgtcacggtgcctgctgcgctgggtgccgcaggcacttggctggcatggcgctggtaccgggtgcaagcgtggcgggagcgtactgcgctgcggcgcgggctgtggcgcatgggctgggcgttgctgctgctctgggccctcagcgttgccgccttctggtgggcgttggcccatcagatcgaacaagcagaaagcgccaccacccgcattgcgccgcaggccatcgtggtgctgggcagtggcacgcccaaagggcagccatcgcccgcgctgcgggcgcggctggacacagcgcatgcgctggccgctgcgcacccacaggcctgggtggtggtgtcgggcggggtggactttggcgaaacgctcagcgagggccaggtcatgggcaactacctgcgcgcgcagggtcttgacccggcgcgcatcctgcaggaagagcgcagcaccagcaccgagctgaacctgcagtacagcctgccgttgctgcaagcccagggcctggggctggactctgccgtggcggtggtgaccagcgactttcacaccctgcgcgcccagcgcattgcccagaagatcggctacacccgcgccctggccgtggcggcgcccacaccgctttacatccgctacaacgcgtggctgcgcgagtatttcgccatggccagcagctggttgctgcgagagctgtgagcggggatgtggcccatatttcagttcatatttcaaatcaaattggcctctagcgcttatcctaaaagcgctagaagctatcaattcaggagtaattcatgagcgctagtacccgcccgttcaaagtcctcggcatccagcaagtcgccattggcggcaccgataagcagcgcatgaaaaccctgtgggtggacatgctgggcctggagcaaaccggcaccttccagagcgagcgcgagaacgtggacgaagacatcctggccatgggcaagggtgccttcaaggtggaggtggacatcatgcagcccctggacattgacaagaaacccgccgtgcacaccacgccgctcaaccacattggcctgtggattgacgacctgccccgcgcggtggaatggctcactgcccagggcgtgcgctttgcgcccggcggcattcgcaagggggctgctggttatgacatcacgtttttgcaccccaagagcaatggcgaatttccgattgcgggcgagggggtgttgatcgagctggtgcaggcgcctgccgatgtgattgccgcattgggctgagccgctgcgctgaccgcgccaaagccaacgccttgctgccttgcgcagcaaggcgttttgttttggcgcgccatcgtgtgcagtttttcacccttggcccgggcacttcacgcgggcccggggcatggtgctttgcgccgttttacattcgcagcttctttgttcaagccttgtgcgaatgcccatgaaactctctttgttggccgtaggtgcggtctcggtgttgatgaccttctctttctccacccaggcccaaagccaggggcaggggggcaagatcaaggacaaggtctacaacattgcttcgcaagacgcggaaatggaggaagcgattggcaaggcccgcgccacgctggacgattttctgaagttgcaagccaatccccccaaaggtgcggaaggcttcaagatcaaggtgaagttctcagggggcggcaacgacgagcacatctgggtcacgccgttccaggtcacttccaaaggcttcacaggcaccctggcgggccagccccgctatgtcacgcacctggagaacgggcagagcgtgcagttcaaccgggccgatgtgtcggactggggctatgtgcagggcggcaagcaaaagggcagctacaccgtgtgcgtgatgttcaaacacatgccggccgccgacgctcagcgctaccgccgcgactacggttttgagtgctgagcctgggcagatggcggtgtaagggggcatgaggctgctgggtgccgcctctgccatcttttcgctgcgggtttcgccaatgggcggccatcacgcaggcatcgcaagccaaatcgatgcaacttcacgcgcaaaccggcgctatctcccagcgcttgccctgcgtgttgactgcagttggtgttgggatgtctgcagttggcgccgggtcttgctgggcggatccagctgcgcattcaattgcatcgaagttggcgtcaacggctgtctttgtgggcagaaaaatcactgaaattgcctgctgataaagcaccctttttcttggcactttttgtgaccctgtggcgcgccgctgctccgtttttcgtttgagaatccgcacttcatcgcgatgcgtggcccaagccgtatcccaccgctggggccgctggcatcgcatcaccctcactgcccgcgtgccgctttgtgcggcgggtgcaggcagatgcattgaaggagcaccccatgtccggattcaccaccccctcgtccgcagccgcgctacaagctgtgcagttgcaccgccgccccgcagccatgccgcagcccgcaggcccctggtcggtcgaggccatccaggcgctgctcgacaagccgctgatggacttgctgtttgaagcccaaaccgtgcaccgccagcactggcccgcaggcgatattgagctggccacgctgctgtcggtcaaaaccggcggctgccctgaaaactgcggttactgcccgcaggccgccgagttcgacaccggcgtgaaggccgacaagctgatggaggtggatgaggtggtgcgcgccgcccaggcggccaaggacgcgggcgccacccgcttttgcatgggcgccgcctggcgcgcgcccaaggaccgcgacattgaaaaagtcagcgcgctgattggcgcggtgaagggcctgggtctgcagacctgtgccacgctgggcatgctcgaatcgcaccaggctcaggcgctgaaagacgcggggctggactactacaaccacaatctggacacggcccccgagtactacaccgatgtggtcagcacccgtgcctaccaggaccggctggacacgctgcaaaacgtgcgcagcgcaggcatcagcgtgtgctgcggcggcattgtgggcatgggcgaggcgcctgtacaccgcgcgggcctgattgcgcagctggccaacctgcaaccgtaccctgagtcggtgcccatcaacagcctcgtgcgtgtgcccggcacgccgctggccgacagcgatcccatcgatccgtttgactttgtgcgcgtgattgcggtggcccgcatcaccatgcccaaggcgcgcgtgcgcttgtcggctgggcgccagcagatgggtgaggcggtgcaggcgctgtgcttcatggccggtgccaactcgattttttacggcgacaagctgctggtgacgggcaaccccgatgtggacgccgacgtgcaattgctggccaagctggggctgaatgggcaccgaacgcaggcccaagaggacggagcgaaggacggcgcagcacaccaggctgtgccgtgcgagagcacctgcggctgaggccatgcgcagggcgggtggctgcccgcgagactacgtgcgagtgtccagcacgatggtttcgattgcctcggcaggcagatcggccgccatgcggtcgactgcctggtgcagggagggctcgccatcggcaaagcgcaaggcgatgcgccgaaactcttcagacagcgtcaaaaaggcgtccaccatgtcggggtcgaagtggctgccgcgcccgtcctggatgatctgcaccgcttgctcatggctgtaggccggcttgtacacgcgcaccgagatgagggcgtcgtacacatcggccaccgccatgaggcgtgcagacagcggaatggtgttacccaccaggcccaaggggtaacctgagccatcccatttttcctggtggctgtaggtgatctctttggcgtagcgaaaaaacgggttgtcctgcgtggtcccgcgctcggccgcgaggatggcttccagccccaacgtcgtgtgcgtcttcatcacttcaaactcttcgggggtgagtgcgccgggcttgagcaggatgcggtccggaatgcccactttgccaatgtcgtgcaacggggcggacttgaagatcatggcgatggccgcttcgctcagatcctctgcaaagcgcgggtgattttgcagcttgcgcgccagcgcctccacatagtgctgggtgcggcggatgtggttgccggtttcgttgtcgcgcgtttcggccagcgaggccatggcgcggatcgtcacgtcctgcagctctgccacctggcgggtgcggcgggccacttcctgctcaaggtaatggttgtggtgggccagcaggtctttggctcgcttgagctgcaggtggttgcgcacccgcgccaacgtgatggcggggttgatgggcttggtgatgtagtccaccgcgcccagctccagcccggtgctttcgtcgtctgacgcgctcatggccgtgaggaagatgacgggaatgtcttcggtctcggggttgaactgcagtcgccgcagcacctcgtagccgtccatgtccggcatcatgatgtccagcaggatcaggtcgggcttgctctcgcccgccacaatttgcagggcccgctcgccactgggcgccagtttgaccttgtagtctgtgcgcagcaggccgctcatcagcgaaaggttgtcgggcgtgtcatcgaccaccagcaccgtgcatttgccgttgggttcgagtgggctgttcatggcggacctccttgtgtgttgtcgttttcaagcttgctggcgttcacgcgttggccttggcatcagcgtgttgtaaggtgcgcagggcggccagggcttcaaccagctggtagttgtccagcgcgcggtccatttcggcatacaccgggccgagggccgcacgcagggcaggggccgattccttgaacagctcgatggcgtctgagtcgtcgtcggccagcagggcatcgagccgctccagcaactgcgaggtggctgcggtggcgatcggtgtttctggcacatcggtcggctcagcagcctcccagggcagggcactttgcaaagctgccaccagggcactacaggcggcatcggttggctgaagcagggcttcgatggcgccatcgggctggccctgggccaaggcctgttccgccgcctcggccagtgctgccagtgggctggcaccgatggtgccagccgtgcctttgagcgtgtgcatgctgcgctgcgcggcatcgcgctgccccgccgccaactggctgcgcgtagtggcaatggccgatgcctgccccgccacaaacttgcgcagcagcgccacgtaggcggcccgtttatcgagcacacgccgcaggcctgcggcggtgtccagcccgtggatgtgcaggagtggatcgtcagcgggtggctcggtggcatcggtgcttaacggtgtgccatgtcctgcggtcggtgctgaggagggcgcctcgctggtgcgcggtgcaatccagtgcagaagtgtggcaaacaattcgtctggatcaatgggctttgcgatgtggccgttcatacccgcttgcaggcatctttccctgtcggcgctcatggcgttggccgtcatggccagcacgggcaactgggcccaggcggggttttcgcgcagaaggcgggtggcggtcaggccgtccatgacgggcatttgcatgtccatgagcacggcgtcgtaagcagtttgggcgagcttgtcgagtgctatctggccgttgtctgccacgtccaccaccaggcctgcatcggtcagcaggtcggcccccacttgttgattgaggtcgttgtcgtccaccagcaaaatccgggcgccccggatggcctgcagcaccgatgcgctgctgggcggtcgggaagatagggggggctggcgcacttcggcgctcaggccgcccagggcctgcatggccgcatccagcaactctgatggactgacgggcttggtgagcatgagctcaatgccgctgcgctccagctctttgcgcgcctcttcgcgcccatgggcggtgacgatgacaggcacgggcggctggggcagtaatgcgagctgctggtgggtctcaaacccgtccatgcccggcatcttccagtcgagaaacgcgatttcaaaaggcgcaccggccgctgtagcgctgcgggccagggccacggcctcctggccgctgcgggcggtggtgacgataaagctcatgcgcgctagcagcaccgacaggatgtggcgggcctggtcgctgtcgtcggccaccaacacccggcgcccgcgcaggtcgggcgagggcagcagaggctgctggcgggcctcccccagccccaggcatgcggtgaaccagaaggtgctgccttgcccgggggcgctggtaacgcctacggcgccgcccatgagttctgccaggcttttggagatggccagccccaggccggtgcctccgtatttgcgggtagtggacgagtcggcctgctcgaacgagcggaacagccgtgactgctgctcgggcgtgagtccgatgccggtgtcttgcacctcaaagcgcagcaccagggcgttgtcgtctgtgctgtcctggcgcacgcgcaccacgatctcgccctggtcggtgaacttgacggcgttgttggcgtaattcaccaaaatttgccccagccgcagcgggtcgccgcgcaggttgtcgggcagatcggggtccacgtcaaacatcagctccagccccttggcggcgcatttgtcgccaatcaggttggccacgttgtccagcacgccgcgcaggtcaaagtcgagtacttccacttccagcttgcctgcctcgatcttgctgaagtcgaggatgtcgttgatcagccccagcaggtggtggcctgagcgctggattttttgcacatagtcgcgctggcgcgccgtcagctcggtgcccagtaccaagtggctcatgccgatgacggcgttcatgggggtgcggatttcgtggctcatgttggccagaaagtccgacttcatctgcgatgcgtcttcggccttggcccgggcaaccaccagttcttcctcgtgctcgcgcagggcttcgttggcttgctgcagctctgtggtgcgctgggccacgcgcgcttccagcgcttcttcgttgcgtttgagggcttccagcagctcggcttgggcctgcatggcctgggacttggcgcgctcgcgtgccacaaactggcgcgccatggcaaacgccagcaaaaacgtgagcagtgcctgaaagctggtgagtccggtagtcagcagggtttggtgctgcacttcttcgttgcgctggtcgcccagcaaggccgacaggcgcgacgcgttcaaagccagctcttgcaccgtctcgcgcagctcggccagctgcgtgcgcaaaaggcgcatgtttttttggcctgagggcacatccacgctttggccaaaatagccatcgcccgcggccacaaactgctgcagcgcccgcaatgcctgcccataaataggctcgtattgcatcagggtgcgggcggtgccgctttcgagcgcgctgaagcggctgaggaacaggtcgtagcgcagggccacggcttccagcgagatgctctctggggccatcacaaactggttcagcgcgtggtccaggcgctcgtattccacgttgagctgcaaaaatgaccacagcgcattcacgtcgccacggcgcatcaccgcttccacgctgcggtactgctggtactgcaccgccgcaatggccacgtaggccagcacgaggctggcgatgatgagtttcaggaagtgcttgctgcgcagcatgcgggcctcctgatggcgttaacggatgcgcagcgcgttgagctgccaggcggcgcggttgtagtacagctcggtgcgcagctcggtcttggtgtcaaaggggtagatgatgaacagcgggcctttttctcgaatgggcatggggcggttgttcatcagccgggccacgatcacctcatgccggtgtacatcggccatcgggatttccgtcttgtagtcattgagtgctaccgccgtgatggcattgcccttgctgcccgcagcggccagcacatcacgcagcagagggcctgtgaacgtgacggcgtcggggtaccacggggtgcgggtggtgaaggtgtgctggggcagcttctccagcatgggcatatcaaactgcgccttggcaccctggttgggcgcgctgatgttgccctctaccgtgagcaccacggggccggtgggtttgtctagcgcctgggcaacatggcttaccagcaacagtggcacggcgcagagcaacgtgcgcaaggcccaagcacacagcgcgctgtgtttgcggtggtcggcagccatatgactctctccctgtacgtagcggccttgctgcctgggtggtgcaagcttcttggcgatatgtaagttatatcagtcaattgttaactacgtaagggaaatttgcacgaggggccggtgcgtggcatccggtgcaggcaccgcagccagccgccacttgggcggcataagcgtgggtgcttgctataaaaatagcagctgctaacgctttattattaagcgctagcgcccatttttatattcaatggctggcaactgcgagcttgtcccaagccgccagggcttcggcggtgtacatgagtgaggggccgccgcccatgtacacgcacacgcccagcatctcttccacctcttggcgtgtggcgcccagtttgagcaaggccttgacgtgaaagccgatgcaccccgagcagcgctggctgacgccaatggccagtgcaatcagctctttgtgtttggcgctcagcgcgccctcggccatggcggcctgcgccagttgtgaaaagccccgcatggtgtcgggctgggccttgcggaaggtggacaggctttcattgatgccttgcatcaggcctgcgtggtcaaacgtgctcatggagggggccttttctggcttttttatgggttatttgttcagaggacacgtgttgatgcccagcagggtgtacgccgggcaaaagcggaacagcccagtggccaaggggatcacgcccagccagccccaccagcccaccgtgccagttacggccagcgcaatcagcaccaggcctgccacgatgcgcagcatgcggtccacggttcctacattgaatttcatggtttctttccttcgggttgttggggcgctttcgagggcgcccgggtgatacctctgcagcacggcgttgcagagggttgtgtggggcctggccgcgttacagggcgttcagcggaatcttcagataagccacgccgttgtcctcggccgggggcagggcgcctgcgcggatattgacttgcacggctggcaggatcagcacgggcatctccagcgtggcgtcgcggcgggtacgtaggctgacaaattcagcttccgtgacgccatcgtgcaggtggatgttgtgcgcccgctggtcggccaccgtgcattgccacgtaggctggcggccaggcggcgggtagtcgtggcacatgaacaggcgcgtgtctggtggcaggctcagcaacttacgcaccgactggtaaaggttgtgcgcactgccgccggggaagtcgcagcgcgcggtgcccacatcgggcatgaacagggtgtcgcccacaaacaccgaatcccccacctgaaaggccatgcaggccggggtgtgaccaggcaccgacagggcctgggcttgcagtttgccgatggcaaacacttcgccatcctggagcaggtggtcgaactggccgccatcgggctggaattcagactccaggtgaaagatgcctttgaatactttttgcacctgcgtgatggccgcgccaatcgcaattgtcccgcccactttttcccgcaggtagtgggcggcggagaggtggtcggcatgggcatgggtttccagaatccactgcaccgtgagcgcctgttctgacacaaaagccagcagcgcatcggctgagcgggtggcggtgcgacccgacttggcgtcgtagtccaacaccgaatccaccagggcgcagtggccgccggcttggtcgtagaccacataactcaccgtccaggtggctgcgtcaaagaatgctttcacggtggggttcacgttgaatgcctcacgctttcaattaagttgaagatagtatgttgacggatatattgtttgtcaatagactattgtcaatgaaattaaaaaccggagccgatgcagatgcccatgaccgctgaaacccacgccaccatggacctggaaaccctgcgcagctcggcagatgctgcttgccgcctgatgaaggtgctctccaatccagaccgcctgttgctgctgtgccaattgaccgaaggcgaaaagcgcgtgggcgagctggaggcattggtgggcattggccagcccacgctgtctcagcaactgggggttctgcgggaagagggccttgtcagcacccggcgcgagggcaagaacatttactacgcgattgccagcccccaggcgctggcggtgatgggggtgttgtttgaacagttttgcgcccccgctgcagcggcggcaaccaccgaggaggcttgagcatgaccatcgattggagccatttcaccccctggatgtcgctggccggtgggttgatgctgggcgtggccgccgccgtgtttgtgctcgtcaatgggcgcatcctgggcatcagcggcattgtgggtgggctgctgcggccccgtgcgggcgatgtgggttggcggctgtcgtttgtgttgggcatggtggctgcgcctgccttgtggttcgcgctggcgggctccgtttctgtgcgggtggatgccagctgggccatggtgctggttgcgggcttgctggtgggggtgggcacccgttacgggtcaggctgtaccagcggccacggggtgtgcggcctgtcgcgcctgtcgccgcgctctttggtggcgacggcatcgttcatgggcgcagggtttgtggctgtgtatgtggtgcgccattggctgggctgaggccctgtggtgcccaatcttgaatgcctcattttgaaaggcctgaaatgaaaagtcgtttgtcagagttcttggtgggcctgttgtttggcctgggtttgatcctgtcgggcatgaccgaccccggcaaggtgctgggctttctcgatctggccgggctgtgggacccgtcgttggcctttgtcatgggtggggccattgctgtcggtgctgttgcatttgccgtggccaaaaagcgcacccgcagctttttgggcggggccatgcatgtgcctacggcgcgggatgtggacaagcgcctggtgctgggtagcctgctgtttggcgtgggctgggggttggcgggcttttgccccggcccggctatcgtctcggctgccgcaggccagcccaaggccttggcctttgtcgccgccatgctggcgggcatgtggctttttgaagtgttggagcgccgggcccagcggacttccagcaaggggcattgaaatgacaccttccttcatcgctgtgacgcaagactttgccgtgtcaccccaattgcaggcgcaagacatggcgtacgttgcatcgcaaggctacaaaacggtggtgaacaatcgcccggacgaagagggcggccccaatcagccgcgcagcgcagacttggcccgggctgcacaagcggcgggcttgcaatatgtttatctgcctgtggtgggtggcgccatcacggccgagcaagcacaggccatgggcgagttgctgcacaccatgcctgctcccgtcctggcgttttgtcggtccggggcgcggtccgcccagctgttcagcctggcgcaggccgggcgttga

SEQ ID NO: 95 - DNA, 24765 bp, Unknown
  From metagenomic library of CO183
caggccaccaccatggaggtctgactggcgagttgccggtagtagtgtgcctcagcctctgctggcgggatgtatccgatgggtccgagcaaccggtgatggttgaaccaggacacccattccagcgttgccagttctaccgattcacgcgttggccatgaccgccggtggattacctcggccttgtacagcccgttgatcgtctcggccagggcgttgtcgtagctgtcgcccttgctgcccaccgagggctcgatgccagcctctgagagacgttcgctgtagcgaatgctgacgtattgcgaccccctgtcggaatgatgaatcaactcgccatcacgctcgggctgccgggcatacagcgcctgctccagggcatccagaacgaagtccgtgtgcatggaactgctgacccgccagcccacaatgcgccgggcgtacacgtcgatcacgaaggccacgtacagccagccctgccaggtcgagacgtaggtgaagtccgagacccacagctggttgggccgctctgccttgaactgtcggttaacccggtccagcgggcacggcgccttcatgtcactgatggtggtacgcaccaccttgccacggcgcacgccctgcaagcccagacgtttcatcaacctctccaccgtgcagcgggcaatgcagactccctctcggttcatctgtttccagactttgtcggcaccatagacccgcatgttggcttgccagacgcgctcgacgtgatgcaccaaggtgtcgtcacgttgggcgcgcgagcagcgcagttggggattacgttggtgagcggcatggcgccaatagcctgacggggcgatctgcagcactttgcagatcgactcgaccccgtaggcttgtcgatgctgatcgacgaaattcttcaggacttcaaacggcggtcgagctccgcctgggcgaaaaacacgctgaccagcttgaggatctcgttggccttgcgcagctctttgacctcgcgctccagtgccttcatctgttcgcgttcggatgtcgtgatgccctcgcgcatgccggtatcgatctggtcacgcttgacccattcattgagggtctggggcacgcagccgatcttgggggcgatggattcaatggcagcccacagcgaggggtactcgcctcggtgctccagcaccatgcgaacagcgcgctcgcggacctcgggtgaaaaatggttcgacttcttgctcatggctcaatcctctcagagtaaagagcctcctcaaaaaccggggcgattcagcctttgcgcgccacaccgacgagatgctcgaccacctgcagcacggcagtcaggctgccggccatggtgccatcggtgtagaagcggcccgccacacccatggaggggacgccctcgaccccgtatgcctcctggagctgtcccgcgcggcgcacctggctggccacattgaaggagttgtacatctccttgaacttggctatgtcgatgccgggctgtttggccatccaagccaggatggcgtcttccttggacaggttcaccttttcaacgtggatcgcacggaaaacacgggcgtgaatctcaccgagtttgcccatgccctccagcgtgtagaaaagcttttgctgaggtgcaaaactggcattgaaggcgactggaacacggcggacgctgatatttttggcatcggcagccttggcccaagcgtcgaaagtgggttcgaatgaattgcagtggccgcagttgtaccagaagaattcgatcacctcgaccttgcccgcgggggcatccgtacccacgggcttgcccagcttcacatagtccttgccctccttgggttgcccgccctgcgccagcgccggcagggacagggtcgcagttgcaagggctgaggctgctgcggtcagggtgaacgtacgtcgttgcatgtcaattttctccggttgggactcggctgtgtgagccatgagaggttggaaagttcagcgttgaacacgcaccagggccgactcgacacctgcgcttgccagtttgtccttgagttgttctgcatcgtcacgtttggcgaaaggtccgacgcgaacccggaacacattgcgcccattctgttcgcgctcgctcacacgcgcttcccagccgagcatggccagcttggcgcgctgggcatcggcatcctgctgggtgcgaaaggctcctgcctggacaaaatagtcaaacggatccacgccgccggacgcagcggccctggaagcggcaaggtctccgaggggatcggcggcaaccctgcctgcgggtttgctggccgcaggctgggcagccgacgctgccgccccggcgggcgcgacagtcgtggaggccggagcggccaccgaggcgggcgtgcgggaaggcgtctttccgtagagcggagaattcggatcccagttcttgttcttctgggcctcggccgcgtcctgggtgccgctgcgggtcgcccccttgttcagaaaggggaccggcaccttggccacatagaccgccacgcccaaggccacgcccaggcccacgatcaggccgatgatgaaaccgacgatggttccgcccagttgctgttgtttcatacgttggttaccactcacattctgcggggggccgacacgcccagcaccgccaggccattgtgcaatacctgcgcggtggcggcgacgagcgccaggcgcgcgcgcttgacggcttcgtcgtccaccaggatgcgctcggcatcgtagtagctgtggtagctggccgccaggtcgcgcaggtagaaggtgacgtcgtgcggcgcctcaccctcggtggcggcggtgagcatttcggggtacttggccagctgcagcatcagcgcctgggcctgagggccgtcaagtgccccaagatcggcgccggccaggccggccacgtcgccaccccaggccgtgagcaccgagcagatgcgcgcatgggcgtactgcacgtagtacaccgggttgtcgttgttctgctgcacggccagatcgacgtcaaatgtgtattcggtgtcgggcttgcggctcagaaggaagaagcgcacggcatccttgctggtccattcgatcaggtcgcgcagtgtcacgtagctgcccgcgcgcttgctgatcttgacctcctcgccgcccttgaccacgcgcaccatggtgtgcagcacgtagtcggggtaacccggcggaatgcccacgtcggccgcctgcagcccggcgcgtacgcgcgcgatggtgccgtggtggtccgtgccctggatgttgacgaccttggtgaagccgcgctcccacttggcgatgtggtaggccacatcgggcacgaagtaggtgtaggtgccgtcgcccttgcgcatgacgcggtccttgtcgtcgccgtagtccgtgctcttgagccacaaagcgccgtcctgctcgtaggtcttgccgttggcaacgagcttgttcaccgtggcttcgacgcgaccgctggtgtacaggctggactcgaggtagtactcgtcaaagtgcagattgaaggcctgcagatccttgtcctgctcattgcgcaggtaggccacggcgaactgacggatgttgtcgtagtcctccacgtcaccattggccgtgaactcgcggtcgtcggccttgacggtggcctttgccttgaaggcctcggcaatgtcggcgatgtagtcgccgttgtagaagttcttggccagcgggttgtcgccgtcggtgggccagcagtcgtcgccgggcttgaagcccttggcccgcagttgcgtgctcttggtgagggtgtcgatctgcacgcccgcgtcgttgtaatagaactcgcggtgcacgctccagccttgcgtggcaaacaggttgctgatggcatcgccaatggcggcctggcggccatggccgacgtgcagcgggccggtggggttggcagagacgaattcgaccagcacacgctcgttgcgggggctctggaaaccgaagcgctcgcccgctgccagcacctcgcgcaccacttcttgcttggcagcgggtttgaggcggatgttcaggaaacccggcccggcgatctcgatggcatggacccagcgctgaaaggcgggcgtggcctccagcgcagtcctgagctgttcgcccaaagcgcgcgggttgagcttgagcggcttggccagttgcatggcggcggtgcaggcaaagtcgccgtgggccgccaccttgggtgattcaaaggccgcccgcgcacctgcgccgggggagagttgttccagctcggctgccagggcagcgagcaattcggttttgacggaaagcatccggcgattttacgggcgggcggtccggtagccgggcaagctgccgggcggcttcagccgcgcgtccccacgccccgcgccaggaacactgccgccagcaacaacgcgcccagcaagtgggtctcgatcatgatccagcggcgtgctgcgcggatttccgtctcgggcggcagcgcgccggtggccagcaggttgcggcgccagcgcaggaaggcgcgtgtgggctgcagcgacatgagccagatcgccacgaacagcgctagcttgaaatgcagcagcggctgcgcccagtaccactccacccctttcatgccccaccaagtgcgcgccagcccggccagcagcacacagatggcagacaccatgtagatcagatcaagccgcaccaggcggtgcacgatggcggggctcatccattcggtgcggcacagcgcggtctcgctggccatgaagaccaccatggtcatgatggccacgaggtggaaaaaggcgagcagggcttccagggtcatgtgggggctccggttttccagaattggggttgttcgtaatggtgccgcaggtgctcgatccacaggcgcacgcgcagcggcaggtgcttgcgctgcggaaacagcacgtaaatgccgttgggcggtgcggcatattcttccagcaccgccacgagctggccggaggcgacttcgccctccacctcccaggtgctgcgccaggcgatgccatggcccgccaggcaccagtcgtgcagcacctgtccgtccgaacagtccagcggcccgccgggtttgaggtacaccacctcggtgccgccgctctcggtgggcatgcgaaacgcccagccgcgtgtctgcgaggcttcgctcgacagcgtgaggcagtcgtgctgagccagctcactcggatggcgcggtgtgccgtggcggtgcaggtagtcgggcgtggccacgcacaggcgccggttgtcggcgatgcgcacgctcaccagcgaggaatcgggcaggtcgcccacgcgcacggcgcagtcgaagccttcgccggccaggtccaccacgcggtcgctgaggttgagcgaaatggtcacgtcggggtgctgtgccaggaagcgcggcaccagcggcgccacatggcggcggccgaaacccgcgggcgccgtgatgcgcaggtgcccgctggccttgacgccaccggccgacacgctggcctcggcgttggccacgtcggacagcagtcgctggcagtcttccagaaaggcactgccctcgtgcgtgaggctgatgcgccgcgtggtgcgcaccagcagcttgacgcccaggtgctcctccagcgcgtccaggcggcggcccatgatggcgggcgccacgccttcggcccgcgcggcggcggtcaggctgccgcgtgttgccaccgatacgaaagactcgaaggccttgagtttgtccatgggcgcagattatggcgaggattcccaggcagcgaggccgccgcagcgcccgccagccgaaatccgaagaatacagataaaaatggcctccagcgcttatccataaagcgctaacagctatttattcggtagcaccctgaagccgtgatttcagaaaacccatggtgccgtagcgctgcacgccggtgtagtggtcgcgcatgagccgctgcaccatggccgtgtaggcctcggcccattcgggggcgatggtgaagtggtcgtagttgaccaccacggccacccgttcgcccaggtccgccagcagacggcgcacctcctgctcgatggcggcgatggtggcggcatcgccaatctgcaaggcagaaaaatcgatgtgcaacaaccgccgctcggtgtccagcgcaaagcgctgtgccagcgggcggttttgcaactgcgcgcgcaggcccagcagctcggggcggaaaagccgctcgtccatggggcgcaggtcagcgctgatgcgcgggcggaacgccatgtgcgccagcacgtcgcgctccaggtcgatgccgggtgccagctcgatgagttccagcgcgccaccgcccccgggctcctctgaaggcaccagacggaacacgcagcgctcggtgacatacagcacgcgctggccccggcgcaaggcctcggcgccgctgaaggtgcggtgctccaccgcgcgcacgaacttgcgcgcgccgccctcgtgcacgatgcgcaggcggccatcctgggcctccacctgcagcgcgccggccgtgaaggtgccgacaaacaccaccgtcttggcgttctggctgatgttgatgaagcccccggcgcccgccaggcgcggcccgaacttgctgacattgaggttgccatgctgatcggcctgggccaggcccaggatggcgaggtccagcccaccgccgtcataaaagtcgaactggctgggctggtcgatgatggcctgcgggttcaccgccgcgccaaaattcagcccgcccgccgggatgccgccaatcacgcccggctcggctgtcagagtgaccagatcgatgatgcgttcctcggccgccacgctggccacgccctcgggcatgcctatccctaagttgacgacctggtgcgggcgcagctcctgcgcggcgcggcgcgcgatcaccttgcgctcggagagcgccatggtgggcaggttgtccatgggcacgcgcagctcgcccgagaacgccgggttgtagggctcggcaaaggtctgctggtggtgtgcgggctccgtggccagtaccacggcgtcgaccagcacacccggcaccttgacctggcgcggattgagcgatccgcgctcggcgatgcgctcgacctgcgcgatcaccacgccgcccgaattgcgcgccgccatggcgatggccagggcctccagggtgagtgcctcgcgctccatggtgaggttgccgtccgggtcggccgtggtggcgcggatgatgcccacatggatgggaaaggccttgtagaacaggtagtcctgcccgtcgatgggcagcaggcgcaccaggtcttcccgggtgcgctcgttcagcttgccgccgccgtggcgcgggtccacaaaggtgtccaggcccacgcgcgtgagcgtgccgggcttgcccgcagcaatgtcgcgaaacaggtgcgagatcacgccctgtggcaggttccaggcctcgatctggttgtccaccgccagcttctggatgcgtggcaccagcccccagtgcccgccgatcacgcgccccagcagccccggctcgcccaggtggttcaagccgcgctgcttgccgtcaccctggcctgcggcatagaccagggtcaaattgcgcggctgctgcgtggcggcgaagcgctgggccagcgccacggcgatgctctcggcaaagccgatgcccacaaaaccgccggtggccaccgtgtcgccgtcgtggatgagctgcaccgcgtcggcggcacccacgatcttgttcttgtggctcacccgcacggcctgggccaggggagcgagcatgttgtcggtggggtgtgtcataggtgaagcgggggtggggcgtgccgggcagcgtagcgctcactccggtagcgggctatccgtgcgactaccacttttgcaaaaaagtcactggttttgcgcttttcaggctatttatgtctttcaatctttgcaataaagtgctgacatggccctccgtacccggtaggccgccgtttatctccattaccaaaggcaactcccatgaccgaccgcaccaccgtccacggcctgcaagtggccaccccgctgttccgctttgtcgaagaccaggtgctgcccggcaccggcatcgacggcgccacgttctggaaaggcttcgacgccatcgtgtccgacctggccccgcgcaacatcgccttgctggccgagcgcgaccgcctgcagaccgagctggacacctggcacaaggccaaccccggtcccatcaaggacatggtggcctaccgtggcttcctcgaaaagatcggctacctggtgccccagcctgcaagcgtgcagaccaccaccgccaatgtggacgacgagctggccacccaggccggcccgcagctggtggtgcccatcctcaatgcccgctatgcgctgaacgccgccaacgcgcgctggggcagcctgtacgacgcgctgtatggcaccgacgccatccccgaaaccgatggcgctgaaaaaggcaagggctacaacccggtgcgcggtgccaaggtgatcgccttcgcccgcgacgtgctcgaccagtcggccccgctggccagcggctcgcacaaggatgccaccggctaccgcgtcgaaggcggccagctcatggtgcagcttcccacgggcagcaccgggctgaaggacgccagccagttcaagggctaccagggcaatgcggcggcaccgtcgtcggtgctgctgcagcacaacggcctgcacctcgacatccagatcgaccgttcgacacccatcggccaaacggacgctgcgggcgtgagcgacctggtgcttgaagccgcgctctccaccatcctcgacctggaagactccgtggccgccgtggatgccgacgacaagctgctgggctacagcaactggctgggcatcatccaggccacgctgaccgagcaggtcagcaagggcggcaagaccttcacgcgcggcctgaacgccgaccgcgtgtacaccgcaccgaacggcggcgaagtgcgcctgcatggccgcagcctgatgttcctgcgcaacgtgggccacctgatgaccaacccggccatcctctggactgacgcgcaaggccagcaacgcgagatccccgaaggcatcatggacgccgtggtcaccaccaccatcgcgctgcacgacctgcaaggccatggtgcgggcggcatccgcaactcgcgcaagggctcggtctacatcgtcaagcccaagatgcacggccccgccgaagtcggctttgccgccgagctgttcggccgtgtggaaaaactcctgggcttgccggacagcaccgtcaagctaggcatcatggatgaagagcgccgcaccagcgtgaacctcaaggcctgcatcgccgccgcgtcgagccgcgtggccttcatcaacaccggcttcctggaccgcaccggcgacgaaatgcacaccgccatgcacgccggcccgatgatccgcaagggtgacatgaagaccagcgcctggatccaggcctacgagcgcaacaacgtgctcgtcggcctgtcctgcggcctgcgcggcaaggcgcagatcggcaagggcatgtgggccatgcccgacctgatggccgaaatgctcaagcagaaaatcgcccaccccaaggccggcgccaacaccgcctgggtgcccagccccacgggcgccacgctgcacgcgctgcactaccaccaggtgaaggtgagcgacatccagatcgaactggaaaaaatcgacgccaccgccgagcgcgacaacctgctgaccggcctgctgaccattcccgttgcggccagcccgaactggaccgacgccgaaaagcagcaggaactcgacaacaacgcccagggcatcctgggctacgtggtgcgctgggtggaccagggcgtgggctgctccaaggtgcccgacatccacaacgtgggcctgatggaagaccgcgccacgctgcgcatcagcagccagcacatggccaactggctgcaccacggcgtggtgaccgaggcccaggtgcgcgccaccttcgagcgcatggctgccgtggtggacggccagaacgcaggcgacccgctgtaccaacccatggccggaaactttggcaccagcatggcctaccaggccgcgtgcgacctggtcttcaagggcctggagcagcccagcggctacaccgagcccctgctgcatgcctggcgcctgaagctcaaggcagcggcttgatcaaatgctattaattcaatagctttcagcgctttatggataagccttgaaggctgttttcattcaaaaaccaacggcaccttcgggtgccgtttttcttgacaggcctctcagccctggcgccgctcgggcaccgcgtcgtcgggcacgggcgcgcgcgacgccagcttgaggtgcagcgccgcctgggccatgaggttggccgacaccggcgccgtgatgaacacgaacagcgtgatcagcagctcggcaatgccggggcggccctggctgaatgccaccagcatcgatgcaatcagcacgccgcccacgcccagggtggacgccttggtgggcgcatgcaggcgcatgaaaaagtcgggcaggcgggccaggccaatggcgcccaccagcaggaagaaggccgcgatcacgatcagcgcggcagcagaccattcgatcagagggtgcatggttactcctttattccaccacgtcgccgcggctcaggtagcgcgccagcgccacggtggaggcaaagcccagcatggccaccagcagggcggcctcgaacagcagcgcggtgttccagcgaatgcccagcagcacgatcagcgccacggcgttcatgtagagcgtgtccagggccagcaggcggtcggtcatttcgggcccgcgcagcaagcgccaggcacacagcaccacggccaccgtcacggcggccacgcccaggttcaatgcgatgtccagaacgttcatgcggtcctcccggcggtggtgccagcgtccggcgttgcggcgcgtggctgctggcgaaaaatctggagcaaaggcgcttcgtagcgcgtcttcatgtcgtcgatcatggcctgcgcgtcgtcgcaggtcagtgcatgcaccaggatgacatggcgctgctcatccaccacgcacgacaccgtgcccggcgtggtggtgatgatggtggcgaacaaggcattcacgcgcgggtggtcgcaggccagcggcaccggcagccaggcgggctgcatgcgcggcagggggccgagtaccagccgggccacggtgatgttggccatcacgatgtccttgagcaccacggcggtcagccgcacggcggccccccagtggatctggacgtggtcgcccagaaacggatgcagcaggcgcggcacgatcagggcgatcagcagtgccgacagcaggtgcaccggctccaggctgtgcgacagcgcgagccagctggcgcccagcagcagggacagcagcggatggctgagccagcccggcttgcgcgggggcgtggcgggggtcgaggtgcggggggtcatcggttctcctcggtgggggccgcggccggtgtgcgttggccgtcgtagggccgggtggtgggggcgtcggtcacgcccagcacggcgcgggcgtaggcggcctggtcggccagctgccgggcggtggcgtcggtgtagcgtttcacgggggacgccagcaccgccatggccagcgtcagcgccatgaaggaccacacggccgacagcagcttgacgctggagcccgcgctggggtcgccccggccttcgtcgggctggatgtgccagaacacgatgaccccggcgcgtgccaggcccacgatggtgaagaagcccacgctgagcaccaccgcccagacccaggcctgggcgggcaggcccgacgagctctccagaatcatcagcttgcccagaaagcccggcaacggcggcagcccggcggccgaggccgcgccaaaaatcatcatcagccccagcagcaccggctcgcgcaccgccgcagcaggccgcagcttgtccagcgcgtcgccgcgctgggcggccatcagctcgaccagcaggaacaggcccgcaatcaccaccgtgctgtgcagcgtgtagtacagcgaagccgacagggtttcaggggagtacagccccacgcccgccaaaatggtgcccaccgacgacacggtgaggtaggccaccaggcggcccatgctgtgtgcggccagcgcccccagcacgcccagcacgctggtggtcagggccagcggcagcagccaggcctgggccgcaaaggcggcctcaccggcctcggggccaaaaatgccccagtgcacgcggatgatgctgtacacgcccaccttggtcatgatggcaaacagcgcggccaccggcgcactggccgacgcgtaggtgcccggtagccagaagtacagcggcaccagcgccgccttcaggccaaacaccaccagcagcaccagtgccgccgcccgcgccagcacggcgctgtcgcccgtgagctggcccacgcgcagggccacgtcggtcatgttgagcgtgccggtgacggcgtacaccagcgccagcccgatcaggaacagccccgaggccgcgaggttgagcaccacatagtgcacgcccatgcggaaccgctcgcggccctggccgtgcaccagcagcacgtacgaggcgatcagcagcacctcgaagaacacgaacaggttaaacaggtcgccggtcaggaaggcgccgcacaggcccatcagctggaactggaacagggcatgaaagtggcggccccgtgtgtcccagccaccggtggcataccagagcaccggcaccgccaccaggtaggtcagcagcaccatgagggccgacaggcggtcgagcaccagcacgatgccaaacggcgcgggccattcacccagctggtacaccagcagctcgccgccactggcgtggcgcaccagctgcacggccatgaacaggcccagcagcaccgacgccatggacagcctgcggccccagcgctggcggctgtcccccgccgtgttgccggagctgttcgagtcaccgatcagcagcaggcccacggccgtgaacaccggcaacagcaccgacagcaccggggcgtgctgcagccagaaagcagagatcacatcccacatcaggcctgccctccactcttgcccgcaggtgcctgggcggcgctgcggtaacccggggcgtggccgggctcgtgcccgtccacgtggtcgctgccgctctcatggcggttgcgcagggcgagttcgatcacaaagccggtggtggcaaagccgatcacgatggcggtgagcaccagcgcctggggcagggggtcggccacggggccatcacccaccaggatgggctgggcgttggaccacaggcggcccatggcaaagatgaacacgttcaccgcatagcccagcagggacaggcccagcaccacgggaaaggtgcgcccgcgcagcatcaggtaaatggcgcaggcagtgacaaagccgatgccggtggccagcaaaaattccatgctcatggggtttccttggtgtgtcgcacggcgggcgaggggtgacgggggcttgcggcgttcatgcggcaggctccggtggccgcggtgcggcgggttgcgggctctcgcggctcacggtgcccagcaccgagatggtcagcagcgtggcgcccaccaccaccaggtagacgcccaggtcaaacagcgccgcagacgccagtggcagctcgcccagcaggggcacatgggggtggccatgggcgctggtcaggaaggggcggccgaacatgaacgcgcccacgccggtgagtccggcaatgcccagaccggcaccaatccatttcacgaagcggcgcccgccctggccgcgcagcagcaattcggccttgacctgtcccatcgacatgaactgcagcaccagcgccacggccgtgatcaggccggcaatgaagccgccgcccggcaggttgtggccgcgcatgaagatgtagagcgtgaacaccagcgccaccggcagcaccaccgccgccgccacgcgcagcagcaggggttgctcggcaaaggtccagttgcggccctcggtgtcggccgtagggcggcgcgtgcgcatgccttccatgagcgccagcacgccaatggcggcaatgcccagcacggtgatttctccaaacgtgtcgtagccccggaagtccaccaggatcacgttgaccacgttggtgccgccgcccaccggcatggacttgtccaggaagtaccaggaaatggagtcgtggtcgcgggtgagcagcacccaggccagccacgacatgcccgcacccccggccagcgccagtgcgccgtcgcgcatgcggcgcaggctgcccgactcgcgcggcgagtgctggggcagcaaggccaggcccatgagcagcagcacggtggacaccacctccaccgacagctgggtcagtgccagatcgggcgccgacaggctcacaaacgacagcgcagtgatcagccccaccacgcccaccagcaccaccgactggaaccgctggtggtgcgtcaccaccagcgccaccgtggtggcccccagcagcagccagatggcaatggccagcggcgacgccggcagcagcgtgcgcggcccggtgcccatggggctgccgctgcccagcacggtcacggccaccacggcaatggcggcgcccagcgtccaggccaggtaatgctgcagcgagccgctttccagccgcgccgagatgcgccccgccaggccaaacaggccgtcgatcagagcgtcaaaaatctggcgcccggtggcggggccaaaccaggcctcggactcgatgcggtgcagccgcttgttggctgccagcagcaggtacagccccacgcccgccaccagggcgatggcgctcatgagcagcggcaggttgaagccgtgccagagggccaggtggtacgcgggcagcgccttgcccgccagggccgtggccgccacgtccaccagcgggccgaaggtgatggcgggcagcaggccgacggcgatgcacatcgtcaccagcagcatggcggggagcttcatgcccagcgggggctcgtgcgggtgggtgttgggcacatcgcccagcggcccgttgaaataggtgtcgtgcacaaagcgcagcgaatacgccacgctgcaaatgccggccagcgtcaccgccgcaggcaccagccaggcccagatgccggtggtgcccaccaccgcttcggtgaagaacatttctttggacaaaaagccgttggtcagcggcaccccggccatggacgccgccgccaccatggacagggtggccgtccagggcatcagcgcccacaggccgccgagcttgcgcatgtcgcggctgtgggtttcgtggtccacgattccggcgatcatgaacagcgaggccttgaacgtggcgtggttcagcacatggaacaccgccgccacggccgccagcggcgagcccagccccaccagaaaggtgatgaggcccaggtggctcacggtggagtacgccagcagccccttgaggtcgtgcttgaagatggcgataaacgccgcaaacagcaccgtgatcaggcccacggtggtcacgatcgcctcgaaccagcccgagcccgccagcaccgggtacatgcgcatgagcaggaacacgccagccttcaccatggtggccgaatgcaggtaggccgacaccggcgtgggggcggccatggcgtcgggcagccagaaatggaacggaaactgcgcgctcttggtgaaggcgccgatcaggatcagcagcagggcgggcacaaacagcgggtcggcctggatggcagccaccttgcccagcatggcgctcagttcataggtgcctgcgatctggcccagcagcacaaagccgcccagcatggccaggccgccgccgccggtcacggccagcgcctggcgggcaccggcgcgcgcgtcggcccggtggctccagtagcccaccagcaggaaggacgacaggctggtcagttcccagaacaccaccagcagcaacaggttgtctgacagcaccacgcccagcatggcggccatgaacagcatcatctcgctgtagaacttgcccgccgaatccttggcgctcaggtagtagtgcgcgtagatgacgatcatcagcccgatgaacaggatcagcccggcaaacatcatcgacaggccgtccagccggaaggtgaggttcagcccgatctcgggcacccaggcccaggcgttcatgatgacctcgcccgccatcaccgcaggcgcgtggcccagcagcaggcccaggctggccgccgtcacggcccccgccgccagcgccgtgagcccccgcgaccgtgaacccagccagaacgtggcggcagtgcccaggaccagcggtagtaaaacgatgagtaacagcacggctctccctttaacgatctttgcccacggctttgcatgccgggtgtgatggtgcgcacgcccccttcgccgccttctcctgcaaaggccgtggcgtgccttcaccgctacaggcggtgcacacctgcgtgcgctggcgggttgacggtctggtgatcgttgcgcctgggcgttgccgggcgattgcgacggtgccgatcgtgccgcgggtggacgcgggaggacggacaggacgcacatcaacgacgtgaccggtgactgtaccgctgccgcgccggtgttcgtgcacaaaaaacagtccagccgctggggaattccctgcacgacaggctgcagtcaggcggttgctgcggtattccatcgctttgcgcggcgggccgtcatggatcgccaccggcctgcgcggtctgcgcagtgctgccgctggggggatgaggggtgcttcatcatttgctattgattgggtagctgcctgcgctttatggataagcctttgagcctgtttttatctaaaattcagcagcggcttcgggcgccgttgcgccgggccttggcctacactccaggcccgcgctgcccctctttgccatgaacaccccgccttcttctccccccggcgcctgccccgcctgcggccagcccaaccagtgcgccatggcctcgggtgccaacccgcagggctgctggtgcatgcaggccccggtgtcccgggcggcactggcccgcctgcccgcgcaggagcgcggccagcgctgcatctgcccggtgtgcgcccgcgagcccgacccctctggcagggccacgcccgggccgcagaccgcgcctttatgatcgattttttgccccaggagcccccatgccgacctaccacattgaaatgatcgaaggccgcacggtcgaacagaagaagaaactcgtcgaggaaatcacccgtgtttccgtcgaggtgctgggcggcacgcccgagatggtggacatcctgatcaccgacgtgaaacgcgaaaactgggccaccggcgggcgcctgtggtccgaacgcagctaagaggctgagaatctttcatccatgcccgccttgcacgccaaaacacaccggctcgtcgttgcaaatactcgccatagcccgcgctatggctgcgttttgcgcctcgatccagtgtgttttgacgcgcctttcgggcacggccgaaaaaccctcagcctctagtccccccactccatgagcggccccggctccctgcaggcgctgcgcgcccaatacggcgagcgttaccgctggctggtgctgctggccgtgatggtgggcaccatggcgtcggtgatgtcatcgaccgtggtcaacgtcgccatccccgacatgagccagcactttgcgctgggccaggagcgcgcgcagtgggtggcctcgggcttcatggtggccatgacggtgtccatgctcaccacgccctggctgctgtcgcgctacggctaccgcgccacctatgcgggctcgatgctgctgctgctggtgggcggcgtggtgggcgggctgtccagccactacagcctggtgctggccgcgcgcgtcgccgagggcctggcggcgggcatcgtgcagcccattccggccatcatcatcctgtatgccttccagccgcacgagcaggggcgcgccagcggcatttttggcatgggcgtggtgctggcacccgcgctgggccccagcatcggcggcctgctggtggactggtttggctggcgctccatcttcttcatggtggtgccgctgtgcatcgtctcgctgtggctggcctacaagctggtgcccaacaccgcgccgggcggcctggcggccaaccggcagagccagtcgctggactggcgcgggctgctgctgggcggcgcgggcacgctgtgcctgctcaacggcctagtcgaattgcgcagcggcccgctgctgcaggcccttgtgctgctggtgctggcggccctgtgtgcgctgctgttcgtcggctggcagcgccgcctgtcgcgccaggggcgctcgccgctgatggagctgggcctgtttcgctaccgcacctttgccatgggcagcatcgtggcgttcatctatggcacggcgctgtttggctccacctacctgctgccggtgttcatgcagatggggctgcaactgtcggcttcgcatgtgggcaccattttgctgcccgcgggcgcggtgctggcgctcaccattccgctggtgggccgcctggccgaccggcagcccacccatctgctggtgagcaccgggctgtttctgctggcgctgtcgttcgcgctcatggtgctgatcgggctggagtcgcccctgtggtggctggtggcctttgccattttgggccgcatcgggctgggtttcatcctgccttcgctcaacctgggcgccatgcggccgctggacaaatcgctcatctcccagggctccagcaccatcggcttcctgcgcatgctggggggcgcggccggtgtcagcctgtgcggcatcgtgctcgaatggcgcctggcggcgcacggcgtgtcgctggccagcagtggcagcagcccggcgcgcatcgcggcgttcagcgagtcgttcctcatgctggcggcgctgtgtgtgctggcgctggtggccgcctggcagttgcgcgacgcgccgcgcgccccttccgcccctgcggcctgaactggatacgagagtgcaaccatgtgccaactgctcggaatgaattgcaacacccccaccgacgtgaccttcagcttcacgggctttgcccagcgcgcgggccacacgggcgaccattgcgacggctggggcattgccttttttgaagacaagggcgtgcgccactttgtggaccacgagcgcgccgtggactcgcccattgccgagctcatccgccgctaccccatcaaaagctgcaacgtcatatcgcacatccgcaaggccacgcaaggcgtggtcgggttgcagaactgccacccgtttgtgcgcgagctgtggggccgctactgggtgtttgcgcacaacggcgacctgaaagactttcgcccccggctgcacagccacttccgccccgtgggaaccaccgacagcgaacacgccttctgctggatcatgcaggagctggccaaatcccacgcgggcgtgcccagcattgccgagctgacgatcacactgcgcgacctggctgcgcgcatcgcgccgcacggcaccttcaactttttgctatccaacggccaggcgctgtgggcccatgcctccacccacctgtattacgtggagcgccgccacccctttgcccaggcgcacctgtccgacgaagacctgcaggtggactttgccacccagacagcccccaccgaccgcgtggccatcatcgtcaccgcaccccttacgcgcaacgaaacctggcacgccttcgccccgcaaacgctgaaggtgtttgtggacggccaagcgcagccgctctgacggcgggcggctgccgtcgcgtcgacttactgaggggggcggtgcagggcgcagagcttgtggccgtccgggtcgcgcaggtacgccaggtacagcttgccccccggggcctcgcgcaggcccggcgggtcttcgcaggtggtgccaccgttggccacaccagccgcgtggaaggcatcggtctgctcgggcgactgcatggcaaaaccgatggtgccgccattgcccacgcaggccggctcgccattgatgggcgtggtgatgccaaacgtgccgtgggggccacggtagaaatagcggttccggttggccaccccggggccgatgcccatcgtggcaaacagcgcgtcgtaaaactttctcgaccgctccaggtcattcacaccgaccatcacatgactgaacatttctctgtctccttgaaagccccagggggcgaattggtgccgcgttgagcgcgtgcaccacacgccagactgtactggctccagcgcgcgggcagctggcaaaaattttgttcaagctgcagcctgcgccatccacgcagcaaactccgatggccgcaacccatagcgcgcgtcacagcgcggcgtgctcaagtccgcctcgccacaaggcaaggtgcgcttgggcttgccgcagcatgcactgggctttatgttcccgcagctgtggcccgaggcggaggcggattcagcaacgcctggccttctgcacggcagctacctgcttcgccgcaaatccaccggcgtgctggagctggagatcgtggacgcctggcaaggcgccatggcgcggcagcaagcaccctgttcagctcaataggcgcccatgtagtcgcgcttgccaatgggcaaaccgttgtggcgcaggatgtcgtaggccgtcgtcacatgaaagaagaactgcggcagaccatagttcgccaggtaggtctgcccgctgagctttttctctttcggcgtgccggggcgcaagacgatctcaacgccttccttgccttcaaattgcgctgcgttcacgctgtccaaaaaggccaaggtctgcgccagcagcgcatccagatcggcaaagcttttctcgtcgcctgcaaagaccggcacatccacccccgccagtcgcgccgcgatgccgcgtgaaaagtcggcggcggtctgcacctgcttgatcagcggaaacatgtcgggcgccagccgtgcctgcagcaaggcgtcgggctcgatcgacttggcggctgcgtagtcgctcgcctgcgcaagaatggttttcaaggctgtcagcatctgcttgaagacgggaaccgagtgggagtacatggggctggtcatggggtggtccggtgagtgtgggaaagggaaaaagccaggggccctgtcgcgccgaggggccaagggctgccaggttcgtgtgcactgggttggaagcgccaggtttgtgccggcttttgcgccgccgggcactgtaacccgcctgtagcgacgggcacttgccaggcgataccacccttgccttgcaaacgggcattcacgtgccaggcgctgtcggatctagcagatcggccgccccgtgcgaggcggcgagcgcaaactggtgatcggccacgccgcgcgcagctacgtggcgctgtaccactacatagatgccctggacgcggcgttcgtgctggccgtgcgcagccagcttgaggccggggtcaagcgctaggttttgagccaaattggccgccagcgcttatggagtaagcgccagcagctatcaaaacgagaataactgccagcctggctacgcgtgtcagaggtgcccctatccgttcgggctgggcctgtcgaagccacccgcagggcgtcgttaacacgtctaatgggaaatacgacccagcgattgaggttcatgcggtgaaaggcccgtttattcaccgcgcaatttgcggcgatgagaagcgacgcatctcccagtcggcaacgccgcaggtcaacccgcccgctcgcccctgagcataccgcgcaaaacagacttttaaatttcacttaactcattgtcattattaatttttcggtaaaaaatctagaaaaacagaaatataccgaaatgcgcgaactcagccccgccatcacccgccagtacatcgacgccgttgccgtgttcgatgcgctggccgaagccaccgaagaagccgcccaagtgcgcggcggcatgtactggcacgcggggccagcctcgtcgccagaatcaaagtacctggtacgcacctcgcctgctggcgcgcaaaccagcctcggcccgcgcacacccgagacgcaggccatctacgacaaattcatgcaaagaaagcaggccagcgccgaacggctcaccggcctgaaagccgcgctggagcagcaccagcgcctgaaccgcgccctgcgggttggcagggtagacccgctggtggtggcgctgctcaaccgcctggccagcacccacctcagcgagcactttcgcgtggtgggcacccacgctctctacgcttacgaggccgccgccggggtgcggctggacgctgacgcactggccacgcgcgacatcgacttgctgtgggacacccgcaaaagcatcatcttctccacccagctcgcccgggtggatagcttcatgctgggagtgctcaaaaaggtagaccccacctttcgcatacggcagggccaaaagtacaccgccgtcaacaaagacggctttgaggtggacatcatccgccgcgagcaaacggacgacgacccacaccccatcaaactcagcgacgcagacgaagacttctgggtggcccaggcccgccgtgccagcatgctgctggactcaccgggtttctctgccgtcatcgtcgccaccaacggcaccatggcacgcatggacaccgtgcacccggccacgtttgtggcgttcaagcggtggatggcagggcaacccgaccgcgacccgctcaagcggcggcgggacgtgctgcaggcggatgcggtgcaggtgctgctggagcagtatttgccgcaggtttaacaggccgttgaaaaaatgctcatcgaacgcgccagggtcgtggatttcgaagaagcgagtcgtccagacgcgcctacgaagcgaatgcgagggccatttcggcctgtttgcaggccgttttgcccgtttcgggcgcacgtatcccatggctcacgcatgatgcgcgtcccaccagccgccgatgctgcccatgcgcaccaggttgtaggtggcaaagcacagcagggcctggcccgcgagcttggcctggccgatcagcttggtcttggccagaccacccaccgtcttgatccagccaaaggcctcctcgatgcgcttgcgcaccttcagactggtcttgtaaccctcgtggcgcttgatgcggccatcgacggccgagtgcttgtccttggccgccacgtgtggcgtgaccttgagctttctgcagcccttgatgaaggccttgctgtcgtagcctttgtcggcaccgaccgtggcccgcttgttcctgttgccccggcgccccaacatggccagcgccgcttcgcgctcggcagtgccattggcgtgtgtgatctccacatccacgatcagcccgttgcggttctccatgaggatgtgccccatgtggcacaggcgggacttgtcacccgcgctcttcttgaacaaccgtgcatcggcgtccgtggtgctttggtgggtgtcgttgcagcgctcctgccctttgaagtccacctcgggattgcgtccgggcggcgtgccgctgtcatcgtctttgcgcttgaagctcttgtgcgaggcccaggcttcgatgagcgtgccgtccacgctgaagtgctcgtcgctggcaagccgcccccactgggcgctgagcttgacgcgctcgaagaaggcacgggcgaggtcttcgttgaacaagcgttcgcggttggcgctgaaggtggagtggtcccagactttgtcctcgatgttcaggcccacgaaccagcggtacagcaggttgtagttgaccgcttcgaccaactggcgctcactgcggatggagaacaggatctgcagcagcagggccttgagcagcatctcgggcggcaccgaggggcgcccacggcgggcatacaccgcttcgaactcgctgtgcatcgtcgccagcagcgcatcgaccacggcgcgcaacttgcgcagcgggtgtgccgctggcacgcgctcttcaaggctgatgtagctgaacatcgccccctggaagtcttggttgcctctcatctttctcgtctgggtcgttcttggatggcttcagatcgtagcggcccacaccggcggcggcgaaggatttttcaacggcctgttaagtgaaaaattagccactagcgcttgattagcaagcgcagccagctatcaaaacagaagcaaattattgccccgctgccccccgcccctcatacgccgccacgatgaacggcttgaccgcgtccagatcggcttgggtcgatagcgtgacttccagattgcccgtgccccagtgcccgatattcgtcacatcgcgtgcgttgggcagcaccggcaaggcggtggcagggtctacgtgcaggtacagcaccaggcagtttttgcggtgcagcaccactgtggcgaagttcttcagacgcttgaaggccaggtacaagcgcagctctttgcgttgcacatcgtcgcccagcgacagcgtatagccctctagcgaagccagcagcaactgcatgggctctggcaaattcaccagcagctcggcaaacgacttgtcgggccccgtgcccttggtgccgatggggtcggcca

SEQ ID NO: 96 - DNA, 5196 bp, Unknown; identical to SEQ ID NO: 75
  From metagenomic library of CO183

What is claimed is:

1. A construct comprising a nucleic acid wherein the nucleic acid encodes a polypeptide that is capable of increasing lignin utilization, and wherein the nucleic acid is selected from the group consisting of nucleic acids that hybridize under stringent hybridization conditions to one of SEQ ID NO. 1, 3, 5, 7, 9, 11, 13, 15, 17, 19, 21, 23, 25, 27, 29, 31, 33, 35, 37, 39, 41, 43, 45, 47, 49, 51, 53, 55, 57, 59, 61, 63, 65, 67, 69, 71, 73, 75, and 77-96, and nucleic acids encoding a polypeptide that is at least 70% identical to a polypeptide encoded by one of SEQ ID NOs: 1, 3, 5, 7, 9, 11, 13, 15, 17, 19, 21, 23, 25, 27, 29, 31, 33, 35, 37, 39, 41, 43, 45, 47, 49, 51, 53, 55, 57, 59, 61, 63, 65, 67, 69, 71, 73, 75, and 77-96.

2. The construct of claim 1, wherein the nucleic acid is one of SEQ ID NOS: 5, 19, 31, 41 and 43.

3. The construct of claim 1, wherein the nucleic acid is one of SEQ ID NOS: 3, 15, 27, 47, and 59.

4. The construct of claim 1, wherein the nucleic acid is a SEQ ID NO: 34.

5. The construct of claim 1, wherein the nucleic acid hybridizes under stringent hybridization conditions to one of SEQ ID NO. 1, 3, 5, 7, 9, 11, 13, 15, 17, 19, 21, 23, 25, 27, 29, 31, 33, 35, 37, 39, 41, 43, 45, 47, 49, 51, 53, 55, 57, 59, 61, 63, 65, 67, 69, 71, 73, 75, and 77-96.

6. The construct of claim 5, wherein the nucleic acid hybridizes under stringent hybridization conditions to one of SEQ ID NO. 1, 3, 5, 7, 9, 11, 13, 15, 17, 19, 21, 23, 25, 27, 29, 31, 33, 35, 37, 39, 41, 43, 45, 47, 49, 51, 53, 55, 57, 59, 61, 63, 65, 67, 69, 71, 73, and 75.

7. The construct of claim 5, wherein the nucleic acid hybridizes under stringent hybridization conditions to one of SEQ ID NOS. 77-96.

8. The construct of claim 5, wherein the nucleic acid is one of SEQ ID NOS: 5, 19, 31, 41 and 43.

9. The construct of claim 5, wherein the nucleic acid is one of SEQ ID NOS: 3, 15, 27, 47, and 59.

10. The construct of claim 5, wherein the nucleic acid is a SEQ ID NO: 34.

11. The construct of claim 1, wherein the nucleic acids encode a polypeptide that is at least 80% identical to a polypeptide encoded by one of SEQ ID NO: 1, 3, 5, 7, 9, 11, 13, 15, 17, 19, 21, 23, 25, 27, 29, 31, 33, 35, 37, 39, 41, 43, 45, 47, 49, 51, 53, 55, 57, 59, 61, 63, 65, 67, 69, 71, 73, 75, and 77-96.

12. The construct of claim 8, wherein the nucleic acid is one of SEQ ID NOS: 5, 19, 31, 41 and 43.

13. The construct of claim 8, wherein the nucleic acid is one of SEQ ID NOS: 3, 15, 27, 47, and 59.

14. The construct of claim 8, wherein the nucleic acid is a SEQ ID NO: 34.

15. The construct of claim 1, wherein the nucleic acids encode a polypeptide that is at least 95% identical to a polypeptide encoded by one of SEQ ID NO: 1, 3, 5, 7, 9, 11, 13, 15, 17, 19, 21, 23, 25, 27, 29, 31, 33, 35, 37, 39, 41, 43, 45, 47, 49, 51, 53, 55, 57, 59, 61, 63, 65, 67, 69, 71, 73, 75, and 77-96.

16. A nucleic acid construct comprising a nucleic acid encoding a non-heme bacterial or archaeal oxidoreductase that binds Fe/Cu/Zn/Mn and utilizes a lignin or a lignin transformation product as a substrate and a nucleic acid encoding one or more bacterial proteins from functional classes (a) to (e): (a) a co-substrate generation; (b) a protein secretion; (c) a small molecule, a breakdown product, a bacterial efflux pump, or a related transmembrane protein, (d) a motility and a protein secretion; and (e) a signal transduction or a transcriptional regulation.

17. The construct of claim 7, wherein the nucleic acid encoding the oxidoreductase hybridizes under stringent hybridization conditions with a nucleic acid selected from the group consisting of SEQ ID NO: 1, 11, 13, 23, 29, 35, 37, 49, 55, 61, 63, 67, 69, and 71.

18. The construct of claim 8, wherein the nucleic acid encoding the bacterial protein from the protein secretion class hybridizes under stringent hybridization conditions with a nucleic acid selected from the group consisting of SEQ ID NO: 5, 19, 31, 41 and 43.

19. The construct of claim 8, wherein the nucleic acid encoding the bacterial protein from the class of the co-substrate generation hybridizes under stringent hybridization conditions with a nucleic acid selected from the group consisting of SEQ ID NO: 3, 15, 27, 47, and 59.

20. The construct of claim 8, wherein the nucleic acid encoding the bacterial protein from the small molecule transport class hybridizes under stringent hybridization conditions to SEQ ID NO: 34.
